(19) United States
(12) Patent Application Publication
(10) Pub. No.: US 2021/0024631 A1
(43) Pub. Date: Jan. 28, 2021

(54) BI-FUNCTIONAL PROTEINS AND CONSTRUCTION THEREOF

(71) Applicants: Orionis Biosciences, Inc., Waltham, MA (US); Orionis Biosciences BV, Ghent (BE)

(72) Inventors: Nikolai KLEY, Waltham, MA (US); Erik DEPLA, Ghent (BE); Lennart ZABEAU, Ghent (BE); Jan TAVERNIER, Balegem (BE)

(21) Appl. No.: 17/042,512

(22) PCT Filed: Mar. 28, 2019
(86) PCT No.: PCT/US19/24714

§ 371 Date: Sep. 28, 2020

Related U.S. Application Data
(60) Provisional application No. 62/649,238, filed on Mar. 28, 2018.
(60) Provisional application No. 62/649,264, filed on Mar. 28, 2018.
(60) Provisional application No. 62/649,248, filed on Mar. 28, 2018.

(51) Int. Cl. C07K 16/28; C07K 14/56; C07K 14/545; C07K 14/565; C07K 14/55

(52) U.S. Cl. CPC C07K 16/2815; C07K 14/56; C07K 14/545; C07K 16/2851; C07K 14/565; C07K 16/2818; A61K 38/00; C07K 16/2863; C07K 16/2896; C07K 14/55; C07K 2317/52; C07K 2317/622; C07K 16/2827

(57) ABSTRACT

The present invention relates, in part, to Fc-based chimeric protein complexes and their use as therapeutic agents. The present invention further relates to pharmaceutical compositions comprising the Fc-based chimeric protein complexes and their use in the treatment of various diseases.

### CROSS-REFERENCE TO RELATED APPLICATIONS

[0001] This application claims the benefit of U.S. Provisional Patent Application Nos. 62/649,238, filed Mar. 28, 2018; 62/649,248, filed Mar. 28, 2018; and 62/649,264, filed Mar. 28, 2018; the entire contents of all of which are hereby incorporated by reference in their entirety.

### FIELD

[0002] The present invention relates, in part, to fragment crystallizable region (Fc)-based chimeric protein complexes and their use as therapeutic agents.

### DESCRIPTION OF THE TEXT FILE SUBMITTED ELECTRONICALLY

[0003] The contents of the text file submitted electronically herewith are incorporated herein by reference in their entirety: A computer readable format copy of the Sequence Listing (filename: ORN-042PC_Sequence_listing, date recorded: Mar. 27, 2019; file size: 1,521,030 bytes).

### BACKGROUND

[0004] Effector function-encoding biologics represent a class of biologics with many potential therapeutic applications. In order for such agents to be useful for the treatment of disease, maximizing their tolerability and therapeutic index is of critical importance, in particular when encoding potent effector functions (e.g., cytokines, many of which are systemically toxic if administered to humans as such). Thus, there is a need for engineering such agents with high inherent safety profile, which requires targeted delivery of an effector function to select target site(s) (e.g. antigen on a cell type of interest) with high precision, and in a regulated fashion.

[0005] An example of such agents, is a chimeric protein having a signaling agent (e.g., cytokine), connected to a targeting element, in which the signaling agent is wild type or modified (e.g. by mutation) to cause an attenuation of the signaling agent's activity (e.g., substantially reducing its ability to interact with/engage its receptor) in a manner such that its effector function can be recovered upon binding of the targeting element to its target (e.g., antigen on target cell).

[0006] However, such chimeric proteins are amenable to therapeutic use only if certain conditions are met, e.g., the ability to be produced in a large scale, an in vivo half-life that ensures adequate time of exposure to the drug to elicit a therapeutically beneficial effect, a proper size to avoid rapid clearance or limited tissue penetrance and bio-distribution, and other properties that ensure adequate solubility, stability and storage without significant loss of function. Importantly all, or substantially most, of the above properties should be achieved without a loss of the conditional targeting of the effector function and retention of conditional engagement of a modified signaling agent with its receptor. Often, it is difficult to achieve all these objectives with chimeric proteins encoded or represented by a single, contiguous polypeptide chain. There is a need in the art where such desirable properties of the biologic can be achieved while maintaining the tolerability and therapeutic index of the biologic.

[0007] There is a need in the art where such desirable properties of the biologic can be achieved while maintaining the tolerability and therapeutic index of the biologic. Further, there is a need for effector function-encoding biologics that are amenable to production use as a therapy to the treatment or prevention of disease.

### SUMMARY

[0008] The present technology provides fragment crystallizable region (Fc)-based chimeric protein complexes in which most, if not all, of the above outlined requirements are met. These constructs encode biological therapeutic agents whose effector function can be delivered in a highly precise fashion to a target of choice and without, or with a mitigated amount of systemic adverse events, thereby limiting systemic cross-reactivities and associated adverse events, while also providing features that impart pharmaceutical properties enabling the production of therapeutic agents with, for example, desired in vivo exposure time (e.g. half-life), size (e.g. for biodistribution and clearance characteristics), as well as large scale production and/or purification for commercial production (e.g. having adequate solubility, purity, stability and storage properties).

[0009] In some aspects, the present technology relates to Fc-based chimeric protein complexes comprising a targeting moiety that comprises a recognition domain which recognizes and/or binds to a target, a wild type or modified signaling agent, wherein the modified signaling agent has one or more mutations that confer improved safety relative to a wild type signaling agent, and an Fc domain, having one or more Fc chains. In some embodiments, the Fc domain has one or more mutations that reduce or eliminate an effector function of the Fc domain, promote Fc chain pairing of the Fc domain, and/or stabilize a hinge region in the Fc domain. In some embodiments, the one or more Fc chains of the Fc domain have one or more mutations that reduce or eliminate an effector function of the Fc domain, promote Fc chain pairing of the Fc domain, and/or stabilize a hinge region in the Fc domain.

[0010] In some embodiments, such Fc-based chimeric protein complexes are heterodimeric. In some embodiments, the Fc-based chimeric protein complexes are heterodimeric and the targeting moiety and the signaling agent are oriented in trans. In some embodiments, the Fc-based chimeric protein complexes are heterodimeric and pairing is via Ridgway knob-in-hole construction (as described herein). In some embodiments, the Fc-based chimeric protein complexes are heterodimeric and pairing is via Merchant knob-in-hole construction (as described herein).

[0011] In some embodiments, such Fc-based chimeric protein complexes are homodimeric.

[0012] In some embodiments, the one or more mutations in the modified signaling agent reduces the affinity or activity at the signaling agent's receptor relative to a wild type signaling agent. In some embodiments, the targeting moiety restores the affinity or activity of the modified signaling agent.

[0013] In some embodiments, the Fc-based chimeric protein complexes comprise one or more additional targeting moieties and/or wild type or modified signaling agents. In some embodiments, the Fc-based chimeric protein complexes are multispecific. In some embodiments, the targeting moieties are a single domain antibody (VHH).

[0014] In another aspect, the present technology relates to the use of Fc-based chimeric protein complexes to treat or prevent various diseases and disorders. In some embodiments, the Fc-based chimeric protein complexes are used to treat cancer, infections, metabolic diseases, (neuro)degenerative diseases, and cardiovascular diseases and immune disorders.

### BRIEF DESCRIPTION OF DRAWINGS

[0015] FIGS. 1A-F, 2A-H, 3A-H, 4A-D, 5A-F, 6A-J, 7A-D, 8A-F, 9A-J, 10A-F, 11A-L, 12A-L, 13A-F, 14A-L, 15A-L, 16A-J, 17A-J, 18A-F, 19A-F, 20A-E, 38, 46A-D, 47, and 49 show various non-limiting illustrative schematics of the Fc-based chimeric protein complexes of the present invention. In embodiments, each schematic is a composition of the present invention. Where applicable in the figures, “TM” refers to a “targeting moiety” as described herein, “SA” refers to a “signaling agent” as described herein, “ [symbol] ” is an optional “linker” as described herein, the two long parallel rectangles are human Fc domains, having one or more Fc chains, e.g. from IgG1, from IgG2, or from IgG4, as described herein and optionally with effector knock-out and/or stabilization mutations as also described herein, and the two long parallel rectangles with one having a protrusion and the other having an indentation are human Fc domains, having one or more Fc chains, e.g. from IgG1, from IgG2, or from IgG4 as described herein, with knob-in-hole and/or ionic pair (a/k/a charged pairs, ionic bond, or charged residue pair) mutations as described herein and optionally with effector knock-out and/or stabilization mutations as also described herein.

[0016] FIGS. 1A-F show illustrative homodimeric 2-chain complexes. These figures show illustrative configurations for the homodimeric 2-chain complexes.

[0017] FIGS. 2A-H show illustrative homodimeric 2-chain complexes with two targeting moieties (TM) (as described herein, more targeting moieties may be present in some embodiments). In embodiments, the position of TM1 and TM2 are interchangeable. In embodiments, the constructs shown in the box (i.e., FIGS. 2B and 2C) have signaling agent (SA) between TM1 and TM2 or between TM1 and Fc.

[0018] FIGS. 3A-H show illustrative homodimeric 2-chain complexes with two signaling agents (as described herein, more signaling agents may be present in some embodiments). In embodiments, the position of SA1 and SA2 are interchangeable. In embodiments, the constructs shown in the box (i.e., FIGS. 3G and 3H) have TM between SA1 and SA2 or TM at N- or C-terminus.

[0019] FIGS. 4A-D show illustrative heterodimeric 2-chain complexes with split TM and SA chains, namely the TM on the knob chain of the Fc and the SA on hole chain of the Fc.

[0020] FIGS. 5A-F show illustrative heterodimeric 2-chain complexes with split TM and SA chains, namely with both TMs on the knob chain of the Fc and with SA on hole chain of the Fc, with two targeting moieties (as described herein, more targeting moieties may be present in some embodiments). In embodiments, the position of TM1 and TM2 are interchangeable. In some embodiments, TM1 and TM2 can be identical.

[0021] FIGS. 6A-J show illustrative heterodimeric 2-chain complexes with split TM and SA chains, namely with TM on the knob chain of the Fc and with a SA on the hole chain of the Fc, with two signaling agents (as described herein, more signaling agents may be present in some embodiments). In these orientations/configurations, one SA is on the knob chain and one SA is on the hole chain. In embodiments, the position of SA1 and SA2 are interchangeable.

[0022] FIGS. 7A-D show illustrative heterodimeric 2-chain complexes with split TM and SA chains, namely the SA on the knob chain of the Fc and the TM on hole chain of the Fc.

[0023] FIGS. 8A-F show illustrative heterodimeric 2-chain complexes with split TM and SA chains, namely with SA on the knob chain of the Fc and both TMs on hole chain of the Fc, with two targeting moieties (as described herein, more targeting moieties may be present in some embodiments). In embodiments, the position of TM1 and TM2 are interchangeable. In some embodiments, TM1 and TM2 can be identical.

[0024] FIGS. 9A-J show illustrative heterodimeric 2-chain complexes with split TM and SA chains, namely with SA on the knob chain of the Fc and TM on hole chain of the Fc, with two signaling agents (as described herein, more signaling agents may be present in some embodiments). In these orientations/configurations, one SA is on the knob chain and one SA is on the hole chain. In embodiments, the position of SA1 and SA2 are interchangeable.

[0025] FIGS. 10A-F show illustrative heterodimeric 2-chain complexes with TM and SA on the same chain, namely the SA and TM both on the knob chain of the Fc.

[0026] FIGS. 11A-L show illustrative heterodimeric 2-chain complexes with a TM and a SA on the same chain, namely with SA and with TM both on the knob chain of the Fc, with two targeting moieties (as described herein, more targeting moieties may be present in some embodiments). In embodiments, the position of TM1 and TM2 are interchangeable. In some embodiments, TM1 and TM2 can be identical.

[0027] FIGS. 12A-L show illustrative heterodimeric 2-chain complexes with a TM and a SA on the same chain, namely with SA and with TM both on the knob chain of the Fc, with two signaling agents (as described herein, more signaling agents may be present in some embodiments). In embodiments, the position of SA1 and SA2 are interchangeable.

[0028] FIGS. 13A-F show illustrative heterodimeric 2-chain complexes with TM and SA on the same chain, namely the SA and TM both on the hole chain of the Fc.

[0029] FIGS. 14A-L show illustrative heterodimeric 2-chain complexes with a TM and a SA on the same chain, namely with SA and with TM both on the hole chain of the Fc, with two targeting moieties (as described herein, more targeting moieties are present in some embodiments). In embodiments, the position of TM1 and TM2 are interchangeable. In embodiments, TM1 and TM2 can be identical.

[0030] FIGS. 15A-L show illustrative heterodimeric 2-chain complexes with a TM and a SA on the same chain, namely with SA and with TM both on the hole chain of the Fc, with two signaling agents (as described herein, more signaling agents may be present in some embodiments). In embodiments, the position of SA1 and SA2 are interchangeable.

[0031] FIGS. 16A-J show illustrative heterodimeric 2-chain complexes with two targeting moieties (as described herein, more targeting moieties may be present in some embodiments) and with SA on knob Fc and TM on each chain. In embodiments, TM1 and TM2 can be identical.

[0032] FIGS. 17A-J show illustrative heterodimeric 2-chain complexes with two targeting moieties (as described herein, more targeting moieties may be present in some embodiments) and with SA on hole Fc and TM on each chain. In embodiments, TM1 and TM2 can be identical.

[0033] FIGS. 18A-F show illustrative heterodimeric 2-chain complexes with two signaling agents (as described herein, more signaling agents may be present in some embodiments) and with split SA and TM chains: SA on knob and TM on hole Fc.

[0034] FIGS. 19A-F show illustrative heterodimeric 2-chain complexes with two signaling agents (as described herein, more signaling agents may be present in some embodiments) and with split SA and TM chains: TM on knob and SA on hole Fc.

[0035] FIGS. 20A-E show five variations of homodimeric or heterodimeric Fc-based chimeric protein complexes that were constructed as described in Example 1. In these illustrative constructs, anti-human C-type lectin domain containing 9A (Clec9A) VHHs were the targeting moiety and human interferon alpha 2 with a R149A mutation was the signaling agent.

[0036] FIG. 21 shows an SDS-PAGE gel resolving purified proteins of FIGS. 20A-E.

[0037] FIG. 22 shows a freezing-thawing stability experiment.

[0038] FIG. 23 shows biological activity of the heterodimeric Fc-based chimeric protein complexes.

[0039] FIG. 24 shows plasma concentrations of Fc-AcTaferons (Fc-AFNs) after intravenous administration in mouse. Average values of 3 individual samples per time point time (+SEM) are plotted.

[0040] FIG. 25 shows tumor growth curves in humanized mice after treatment with buffer or two different Fc-AFN constructs. Average values (in mm³) of 6 animals per time point time (+SEM) are plotted.

[0041] FIG. 26 shows biological activity of linker-length variants on HL116-hClec9A cells. HL116-hClec9A cells were stimulated for 6 hours with a serial dilution of linker length variants. Average luciferase values (±STDEV) of triplicate measurements are plotted.

[0042] FIG. 27 shows biological activity of effector-variants on HL116 and HL116-hClec9A cells. Parental HL116 or the derived HL116-hClec9A cells were stimulated for 6 hours with a serial dilution of Fc AFNs. Average luciferase values (±STDEV) of triplicate measurements are plotted.

[0043] FIG. 28 shows binding of (complement component 1q) C1q to Fc domain (CH2 and CH3 domains) of the human IgG1 heavy chain and the hinge region (hIgG1) or Fc Actaferons (AFNs) with different effector-mutations in bio-layer interferometry (BLI).

[0044] FIG. 29 shows effect of Interferon (IFN) mutations on biological activity in HL116 and HL116-hClec9A cells. Parental HL116 or the derived HL116-hClec9A cells were stimulated for 6 hours with a serial dilution of Fc AFNs. Average luciferase values (±STDEV) of triplicate measurements are plotted.

[0045] FIG. 30 shows biological activity of different Fc formats on HL116 and HL116-hClec9A cells. Parental HL116 or the derived HL116-hClec9A cells were stimulated for 6 hours with a serial dilution of Fc AFNs. Average luciferase values (±STDEV) of triplicate measurements are plotted.

[0046] FIG. 31 shows biological activity of Fc AFNs with different knob in hole (KiH) on HL116 and HL116-hClec9A cells. Parental HL116 or the derived HL116-hClec9A cells were stimulated for 6 hours with a serial dilution of Fc AFNs. Average luciferase values (±STDEV) of triplicate measurements are plotted.

[0047] FIG. 32 shows biological activity of mono- and bivalent Fc AFNs on HL116 and HL116-hClec9A cells. Parental HL116 or the derived HL116-hClec9A cells were stimulated for 6 hours with a serial dilution of Fc AFNs. Average luciferase values (±STDEV) of triplicate measurements are plotted.

[0048] FIG. 33 shows relative binding of mono- and bivalent targeted Fc AFN to HL116-hClec9A cells.

[0049] FIG. 34 shows biological activity of Fc AFNs on HL116 and HL116-hClec9A cells. Parental HL116 or the derived HL116-hClec9A cells were stimulated for 6 hours with a serial dilution of Fc AFNs. Average luciferase values (±STDEV) of duplicate measurements are plotted.

[0050] FIG. 35 shows plasma concentrations of Fc-AFNs after intravenous administration in mouse. Average values of 3 individual samples per time point time (+SEM) are plotted.

[0051] FIG. 36 shows tumor growth curves in humanized mice after treatment with buffer or four different Fc-AFN constructs. Average values (in mm³) of 5 animals per time point time (+SEM) are plotted.

[0052] FIG. 37 shows tumor growth curves in humanized mice after treatment with buffer or increasing doses of a single Fc-AFN construct. Average values (in mm³) of 5 animals per time point time (+SEM) are plotted.

[0053] FIG. 38 shows schematic representation and biological activity of PD-L1 VHH AFN variants. Parental HL116 cells were stimulated for 6 hours with a serial dilution of Fc AFNs. Average luciferase values (±STDEV) of triplicate measurements are plotted.

[0054] FIG. 39 shows tumor growth curves in humanized mice after treatment with PBS, PD-L1 inhibitor (atezolizumab) or PD-L1 targeted Fc-AFN. Average values (in mm³) of 6 animals per time point time (+SEM) are plotted.

[0055] FIG. 40 shows biological activity of IFNa2 and Clec4C VHH Fc AFN on HL116 and HL116-hClec4C cells. Parental HL116 or the derived HL116-hClec4C cells were stimulated for 6 hours with a serial dilution of Fc AFNs. Average luciferase values (±STDEV) of triplicate measurements are plotted.

[0056] FIG. 41 shows biological activity of IFNa2 and CD20 VHH Fc AFN on HL116 and HL116-hCD20 cells. Parental HL116 or the derived HL116-hCD20 cells were stimulated for 6 hours with a serial dilution of Fc AFNs. Average luciferase values (±STDEV) of triplicate measurements are plotted.

[0057] FIG. 42 shows biological activity of CD13 VHH Fc AFN on parental HL116 cells. Parental HL116 were stimulated for 6 hours with a serial dilution of CD13 Fc AFNs in the presence or absence of an excess CD13 VHH. Average luciferase values (±STDEV) of triplicate measurements are plotted.

[0058] FIG. 43 shows biological activity of IFNa2 and FAP VHH Fc AFNs on HL116 and HL116-hFAP cells. Parental HL116 or the derived HL116-hFAP cells were stimulated for 6 hours with a serial dilution of Fc AFNs. Average luciferase values (±STDEV) of triplicate measurements are plotted.

[0059] FIG. 44 shows biological activity of IFNa2 and CD8 VHH Fc AFN on HL116 and HL116-hCD8 cells. Parental HL116 or the derived HL116-hCD8 cells were stimulated for 6 hours with a serial dilution of Fc AFNs. Average luciferase values (±STDEV) of triplicate measurements are plotted.

[0060] FIG. 45 shows relative binding of bispecific CLEC9A and PD-L1 targeting Fc AFN to parental PD-L1 positive HL116 cells (top) and HL116-hClec9A cells (expressing both targets; bottom), including competition with the free PD-L1 VHH 2LIG99

[0061] FIGS. 46A-D show illustrative heterodimeric 2-chain complexes with two targeting moieties (as described herein, more targeting moieties are present in some embodiments) and with SA on knob Fc and TM on each chain. Each targeting moiety is present in 2 copies and the positions of TM1 and TM2 are interchangeable.

[0062] FIG. 47 shows schematic representation and biological activity of bi-specific Clec9A-PD-L1 Fc AFN variants. Parental HL116 (left) and HL116-hClec9A (right) cells were stimulated for 6 hours with a serial dilution of Fc AFNs. Average luciferase values (±STDEV) of triplicate measurements are plotted.

[0063] FIG. 48 shows tumor growth curves in humanized mice after treatment with PBS, mono- or bispecific Fc-AFNs. Average values (in mm²) of 4-5 animals per time point time (+SEM) are plotted.

[0064] FIG. 49 shows schematic representation and biological activity of bi-specific Clec4C-CD8 Fc AFN variants. Parental HL116, HL116-hClec4C and HL116-hCD8 cells were stimulated for 6 hours with a serial dilution of Fc AFNs. Average luciferase values (±STDEV) of triplicate measurements are plotted.

[0065] FIG. 50 shows biological activity of IFNa2 and scFv Xcr1 Fc AFN on HL116 and HL116-hXcr1 cells. Parental HL116 or the derived HL116-hXcr1 cells were stimulated for 6 hours with a serial dilution of Fc AFNs. Average luciferase values (±STDEV) of triplicate measurements are plotted.

[0066] FIG. 51 shows biological activity of IFNa2 and scFv CD20 Fc AFN on HL116 and HL116-hCD20 cells. Parental HL116 or the derived HL116-hCD20 cells were stimulated for 6 hours with a serial dilution of Fc AFNs. Average luciferase values (±STDEV) of triplicate measurements are plotted.

[0067] FIG. 52 shows biological activity of tumor necrosis factor (TNFα) and CD20 Fc AcTafactors (AFRs) on HEK-Dual and HEK-Dual-hCD20 cells. Parental HEK-Dual or the derived HEK-Dual-hCD20 cells were stimulated overnight with a serial dilution of Fc AFRs. Average luciferase values (±STDEV) of triplicate measurements are plotted.

[0068] FIG. 53 shows pSTAT1 upon FMS-like tyrosine kinase 3 ligand (FLT3L)-Fc-AFN in transient transfected Hek293T cells. FLT3 or MOCK (empty vector) transfected Hek293T cells were stimulated as indicated and stained for pSTAT1. Average % of pSTAT1 positive cells (±STDEV) of duplicate measurements are plotted.

[0069] FIG. 54 shows biological activity of IFNa2 and the extracellular (ec) portion of programmed cell death protein 1 (PD-1) (PD-1ec) Fc AFN on HL116 cells. Parental HL116 cells were stimulated for 6 hours with a serial dilution of Fc AFNs in the presence or absence of an excess neutralizing VHH. Average luciferase values (±STDEV) of triplicate measurements are plotted.

[0070] FIG. 55 shows biological activity of IFNa2 and PD-L1ec Fc AFN on HL116 and HL116-hPD-1 cells. Parental HL116 or the derived HL116-hPD-1 cells were stimulated for 6 hours with a serial dilution of Fc AFNs. Average luciferase values (±STDEV) of triplicate measurements are plotted.

[0071] FIG. 56 shows biological activity of NGR peptide based Fc AFN targeting CD13. Parental HL116 cells were stimulated for 6 hours with a serial dilution of Fc AFNs. Average luciferase values (±STDEV) of duplicate measurements are plotted. Specificity is demonstrated by comparison with CLEC9A targeted Fc AFN (R1CHCL50) FIG. 57 shows biological activity of targeted wild type and mutant IFNa2 on C-Type Lectin Domain Family 4 Member C (Clec4C) positive and negative cells. Peripheral blood mononuclear cells (PBMC's) from healthy donors were stained with Clec4C Ab and stimulated with Clec4C-targeted wild type or mutant IFNa2 for 15 minutes. After fixation and permeabilization, cells were stained with a pSTAT1 Ab. Data are plotted as percentage of pSTAT1 positive cells.

[0072] FIG. 58 shows biological activity of targeted wild type and mutant IFNa2 on CD8 positive and negative cells. Peripheral blood mononuclear cells (PBMC's) from healthy donors were stained with CD8 Ab and stimulated with CD8-targeted wild type or mutant IFNa2 for 15 minutes. After fixation and permeabilization, cells were stained with a pSTAT1 Ab. Data are plotted as percentage of pSTAT1 positive cells.

[0073] FIG. 59 shows biological activity of targeted wild type and mutant IFNa2 on CD19 positive (i.e. B-cells) and negative cells. PBMC's from healthy donors were stained with CD19 Ab and stimulated with CD20-targeted wild type or mutant IFNa2 for 15 minutes. After fixation and permeabilization, cells were stained with a pSTAT1 Ab. Data are plotted as percentage of pSTAT1 positive cells.

[0074] FIG. 60 shows an overview of point mutation in IFNa2. This Figure shows the sequence of mature human IFNa2 (SEQ ID NO: 2) from Amino Acid No. 30-39 and 142-165.

[0075] FIG. 61 shows biological activity of different Clec9A VHH Fc AFNs on HL116 and HL116-hClec9A cells. Parental HL116 or the derived HL116-hClec9A cells were stimulated for 6 hours with indicated concentrations of Fc AFNs. Average luciferase values (±STDEV) of triplicate measurements are plotted. For each mutant the bars are, left to right, 1000 ng/ml, 10 ng/ml, 0.1 ng/ml, and not stimulated

[0076] FIG. 62 shows biological activity of IFNa1 and Clec9A VHH Fc AFN on HL116 and HL116-hClec9A cells. Parental HL116 or the derived HL116-hClec9A cells were stimulated for 6 hours with a serial dilution of Fc AFNs. Average luciferase values (±STDEV) of triplicate measurements are plotted.

[0077] FIG. 63 shows biological activity of IFNb and Clec9A VHH Fc AFN on HL116 and HL116-hClec9A cells. Parental HL116 or the derived HL116-hClec9A cells were stimulated for 6 hours with a serial dilution of Fc AFNs. Average luciferase values (±STDEV) of triplicate measurements are plotted.

[0078] FIG. 64 shows biological activity of AcTaleukin (ALN) on transient transfected HEK-Blue IL-1β cells. MOCK (an empty vector) or human CD8 transfected cells were stimulated overnight with a serial dilution wild type IL-1β or ALN. Average luciferase values (±STDEV) of triplicate measurements are plotted.

[0079] FIG. 65 shows biological activity of TNFα and CD20 VHH Fc AFR on HEK-Dual and HEK-Dual-hCD20 cells. Parental HEK-Dual or the derived HEK-Dual-hCD20 cells were stimulated overnight with a serial dilution of Fc AFR. Average luciferase values (±STDEV) of triplicate measurements are plotted.

[0080] FIG. 66 shows biological activity of IFNa2 and bi-AcTakine on HL116 and HL116-hCD8 cells. Parental HL116 or the derived HL116-hCD8 cells were stimulated for 6 hours with a serial dilution of bi-AcTakine. Average luciferase values (±STDEV) of triplicate measurements are plotted.

[0081] FIG. 67 shows biological activity of bi-AcTakine on transient transfected HEK-Blue IL-1β cells. MOCK or human CD8 transfected cells were stimulated overnight with a serial dilution wild type IL-1β or bi-AcTakine. Average luciferase values (±STDEV) of triplicate measurements are plotted.

[0082] FIG. 68 shows biological activity of Clec9A Fc AFN variant based on human IgG1 and IgG4. Parental HL116 and HL116-hClec9A cells were stimulated for 6 hours with a serial dilution of Fc AFNs. Average luciferase values (±STDEV) of triplicate measurements are plotted.

[0083] FIG. 69 shows the plasma concentrations of a CLEC9A AFN (which is not an Fc-based chimeric protein complex) after intravenous administration in mouse. Average values of 3 individual samples per time point time (+SEM) are plotted.

### DETAILED DESCRIPTION

[0084] The present technology is based, in part, on the discovery of signaling agents, that are optionally modified to have reduced affinity or activity for one or more of its receptors, and targeting moieties that recognize and bind to a specific target. In some embodiments, one or more signaling agents and one or more targeting moieties are linked and/or conjugated and/or fused to Fc-based chimeric proteins that can pair to form Fc-based chimeric protein complexes. Such Fc-based chimeric protein complexes, surprisingly, have dramatically improved half-lives in vivo, as compared to chimeras lacking an Fc and, especially in the heterodimer configuration as described herein, are particularly amendable to production, purification, and pharmaceutical formulation due to enhanced solubility, stability and other drug-like properties. Accordingly, the present Fc-based chimeric protein complex engineering approach yields agents that are particularly suited for use as therapies.

[0085] In some embodiments, these Fc-based chimeric protein complexes may bind and directly or indirectly recruit immune cells to sites in need of therapeutic action (e.g. a tumor or tumor microenvironment). In some embodiments, the Fc-based chimeric protein complexes enhance tumor antigen presentation for elicitation of effective antitumor immune response. In some embodiments these Fc-based chimeric protein complexes may bind tumor cells, tumor microenvironment-associated cells or stromal targets. In some embodiments. these Fc-based chimeric protein complexes may bind to tissue-specific and/or cell-specific specific markers (e.g. antigens, targets) associated with disease-affected or disease-associated organs, tissues and cells. In some embodiments these Fc-based chimeric protein complexes may bind to more than one target/protein marker/antigen present on the same or different cells. In some embodiments these Fc-based chimeric protein complexes may bind to two or more cell types. In some embodiments these Fc-based chimeric protein complexes may bind to more than one cell type and promote formation of a cell complex (e.g. an immune cell and a tumor cell).

[0086] In some embodiments, the Fc-based chimeric protein complexes modulate antigen presentation. In some embodiments, the Fc-based chimeric protein complexes temper the immune response to avoid or reduce autoimmunity. In some embodiments, the Fc-based chimeric protein complexes provide immunosuppression. In some embodiments, the Fc-based chimeric protein complexes cause an increase a ratio of Tregs to CD8+ T cells and/or CD4+ T cells in a patient. In some embodiments, the present methods relate to reduction of auto-reactive T cells in a patient.

[0087] In some embodiments, the Fc-based chimeric protein complexes are a complex of proteins formed, for example, by disulfide bonding and/or ionic pairing. In embodiments, the complex of proteins includes one or more fusion proteins. In some embodiments, the Fc-based chimeric protein complex has a configuration and/or orientation/configuration as shown in any one of FIGS. 1A-F, 2A-H, 3A-H, 4A-D, 5A-F, 6A-J, 7A-D, 8A-F, 9A-J, 10A-F, 11A-L, 12A-L, 13A-F, 14A-L, 15A-L, 16A-J, 17A-J, 18A-F, 19A-F, 20A-E, 38, 46A-D, 47 and 49. In some embodiments, the Fc-based chimeric protein complex has a configuration and/or orientation/configuration as shown in FIG. 7B.

[0088] The present technology provides pharmaceutical compositions comprising the Fc-based chimeric protein complexes and their use in the treatment of various diseases, including, e.g., cancer, autoimmune, neurodegenerative diseases, metabolic diseases, cardiovascular diseases and degenerative diseases.

### Fc Domains

[0089] The fragment crystallizable domain (Fc domain) is the tail region of an antibody that interacts with Fc receptors located on the cell surface of cells that are involved in the immune system, e.g., B lymphocytes, dendritic cells, natural killer cells, macrophages, neutrophils, eosinophils, basophils, and mast cells. In IgG, IgA and IgD antibody isotypes, the Fc domain is composed of two identical protein chains, derived from the second and third constant domains of the antibody's two heavy chains. In IgM and IgE antibody isotypes, the Fc domain contains three heavy chain constant domains (C_{H} domains 2-4) in each polypeptide chain.

[0090] In some embodiments, the Fc-based chimeric protein complex of the present technology include(s) chimeric proteins with Fc domains that promotes formation of such protein complexes. In some embodiments, the Fc domains are from selected from IgG, IgA, IgD, IgM, or IgE. In some embodiments, the Fc domains are from selected from IgG1, IgG2, IgG3, or IgG4.

[0091] In some embodiments, the Fc domains are from selected from human IgG, IgA, IgD, IgM, or IgE. In some embodiments, the Fc domains are from selected from human IgG1, IgG2, IgG3, or IgG4.

[0092] In some embodiments, the Fc domains of the Fc-based chimeric protein complex comprise the CH2 and CH3 regions of IgG. In some embodiments, the IgG is human IgG. In some embodiments, the human IgG is selected from IgG1, IgG2, IgG3, or IgG4.

[0093] In some embodiments, the Fc domains comprise one or more mutations. In some embodiments, the mutation(s) to the Fc domains reduces or eliminates the effector function the Fc domains. In some embodiments, the mutated Fc domain has reduced affinity or binding to a target receptor. By way of example, in some embodiments, the mutation to the Fc domains reduces or eliminates the binding of the Fc domains to FcγR. In some embodiments, the FcγR is selected from FcγRI; FcγRIIa, 131 R/R; FcγRIIa, 131 H/H, FcγRIIb; and FcγRIII. In some embodiments, the mutation to the Fc domains reduces or eliminated binding to complement proteins, such as, e.g., C1q. In some embodiments, the mutation to the Fc domains reduces or eliminated binding to both FcγR and complement proteins, such as, e.g., C1q.

[0094] In some embodiments, the Fc domains comprise the LALA mutation to reduce or eliminate the effector function of the Fc domains. By way of example, in some embodiments, the LALA mutation comprises L234A and L235A substitutions in human IgG (e.g., IgG1) (wherein the numbering is based on the commonly used numbering of the CH2 residues for human IgG1 according to EU convention (PNAS, Edelman et al., 1969; 63 (1) 78-85)).

[0095] In some embodiments, the Fc domains of human IgG comprise a mutation at one or more of L234, L235, K322, D265, P329, and P331 to reduce or eliminate the effector function of the Fc domains. By way of example, in some embodiments, the mutations are selected from L234A, L234F, L235A, L235E, L235Q, K322A, K322Q, D265A, P329G, P329A, P331G, and P331S.

[0096] In some embodiments, the Fc domains comprise the FALA mutation to reduce or eliminate the effector function of the Fc domains. By way of example, in some embodiments, the FALA mutation comprises F234A and L235A substitutions in human IgG4.

[0097] In some embodiments, the Fc domains of human IgG4 comprise a mutation at one or more of F234, L235, K322, D265, and P329 to reduce or eliminate the effector function of the Fc domains. By way of example, in some embodiments, the mutations are selected from F234A, L235A, L235E, L235Q, K322A, K322Q, D265A, P329G, and P329A.

[0098] In some embodiments, the mutation(s) to the Fc domain stabilize a hinge region in the Fc domain. By way of example, in some embodiments, the Fc domain comprises a mutation at S228 of human IgG to stabilize a hinge region. In some embodiments, the mutation is S228P.

[0099] In some embodiments, the mutation(s) to the Fc domain promote chain pairing in the Fc domain. In some embodiments, chain pairing is promoted by ionic pairing (a/k/a charged pairs, ionic bond, or charged residue pair).

[0100] In some embodiments, the Fc domain comprises a mutation at one more of the following amino acid residues of IgG to promote of ionic pairing: D356, E357, L368, K370, K392, D399, and K409.

[0101] By way of example, in some embodiments, the human IgG Fc domain comprise one of the mutation combinations in Table 1 to promote of ionic pairing.

TABLE 1

| Substitution(s) | Substitution(s) |
|---|---|
| on one Fc Chain | on other Fc Chain |
| D356K D399K | K392D K409D |
| E357R L368R | K370D K409D |
| E357R L368K | K370D K409D |
| E357R D399K | K370D K409D |
| E357R | K370D |
| L368R D399K | K392D K409D |
| L368K D399K | K392D K409D |
| L368R D399K | K409D |
| L368K D399K | K409D |
| L368R | K409D |
| L368K | K409D |
| K370D K409D | E357R D399K |
| K370D K409D | E357R L368R |
| K370D K409D | E357R L368K |
| K370D K409D | E357R D399K |
| K370D K409D | E357R L368R |
| K370D K409D | E357R L368K |
| K370D | E357R |
| K370D | E357R |
| K392D K409D | D356K D399K |
| K392D K409D | L368R D399K |
| K392D K409D | L368K D399K |
| K392D K409D | D399K |
| D399K | K392D K409D |
| D399K | K409D |
| K409D | L368R |
| K409D | L368K |
| K409D | L368R D399K |
| K409D | L368K D399K |
| K409D | L368R |
| K409D | L368K |
| K409D | L368R D399K |
| K409D | L368K D399K |
| K409D | D399K |

[0102] In some embodiments, chain pairing of the individual Fc-domains in a chimeric protein complex is promoted by knob-in-hole mutations. In some embodiments, the Fc domain comprises one or more mutations to allow for a knob-in-hole interaction in the Fc domain. In some embodiments, a first Fc chain is engineered to express the “knob” and a second Fc chain is engineered to express the complementary “hole.” By way of example, in some embodiments, human IgG Fc domain comprises the mutations of Table 2 to allow for a knob-in-hole interaction.

TABLE 2

| Substitution(s) | Substitution(s) |
|---|---|
| on one Fc Chain | on other Fc Chain |
| T366Y | Y407T |
| T366Y/F405A | T394W/Y407T |
| T366W | Y407A |
| T366W | Y407V |
| T366Y | Y407A |
| T366Y | Y407V |
| T366Y | Y407T |

[0103] In some embodiments, the Fc domains in the Fc-based chimeric protein complexes of the present technology comprise any combination of the above-disclosed mutations. By way of example, in some embodiments, the Fc domain comprises mutations that promote ionic pairing and/or a knob-in-hole interaction. By way of example, in some embodiments, the Fc domain comprises mutations that have one or more of the following properties: promote ionic pairing, induce a knob-in-hole interaction, reduce or eliminate the effector function of the Fc domain, and cause Fc stabilization (e.g. at hinge).

[0104] By way of example, in some embodiments, a human IgG Fc domain comprise mutations disclosed in Table 3, which promote ionic pairing and/or promote a knob-in-hole interaction in the Fc domain.

TABLE 3

| Substitution(s) | Substitution(s) |
|---|---|
| on one Fc Chain | on other Fc Chain |
| T366W K370D | E357R Y407A |
| T366W K370D | E357R Y407V |
| T366W K409D | L368R Y407A |
| T366W K409D | L368R Y407V |
| T366W K409D | L368K Y407A |
| T366W K409D | L368K Y407V |
| T366W K409D | L368R D399K Y407A |
| T366W K409D | L368R D399K Y407V |
| T366W K409D | L368K D399K Y407A |
| T366W K409D | L368K D399K Y407V |
| T366W K409D | D399K Y407A |
| T366W K409D | D399K Y407V |
| T366W K392D K409D | D399K Y407A |
| T366W K392D K409D | D399K Y407V |
| T366W K392D K409D | D356K D399K Y407A |
| T366W K392D K409D | D356K D399K Y407V |
| T366W K370D K409D | E357R D399K Y407A |
| T366W K370D K409D | E357R D399K Y407V |
| T366W K370D K409D | E357R L368R Y407A |
| T366W K370D K409D | E357R L368R Y407V |
| T366W K370D K409D | E357R L368K Y407A |
| T366W K370D K409D | E357R L368K Y407V |
| T366W K392D K409D | L368R D399K Y407A |
| T366W K392D K409D | L368R D399K Y407V |
| T366W K392D K409D | L368K D399K Y407A |
| T366W K392D K409D | L368K D399K Y407V |
| E357R T366W | K370D Y407A |
| E357R T366W | K370D Y407V |
| T366W L368R | Y407A K409D |
| T366W L368R | Y407V K409D |
| T366W L368K | Y407A K409D |
| T366W L368K | Y407V K409D |
| T366W L368R D399K | Y407A K409D |
| T366W L368R D399K | Y407V K409D |
| T366W L368K D399K | Y407A K409D |
| T366W L368K D399K | Y407V K409D |
| T366W D399K | Y407A K409D |
| T366W D399K | Y407V K409D |
| 1366W D399K | K392D Y407A K409D |
| T366W D399K | K392D Y407V K409D |
| T366W D356K D399K | K392D Y407A K409D |
| T366W D356K D399K | K392D Y407V K409D |
| E357R T366W D399K | K370D Y407A K409D |
| E357R T366W D399K | K370D Y407V K409D |
| E357R T366W L368R | K370D Y407A K409D |
| E357R T366W L368R | K370D Y407V K409D |
| E357R T366W L368K | K370D Y407A K409D |
| E357R T366W L368K | K370D Y407V K409D |
| T366W L368R D399K | K392D Y407A K409D |
| T366W L368R D399K | K392D Y407V K409D |
| T366W L368K D399K | K392D Y407A K409D |

[0105] By way of example, in some embodiments, human IgG Fc domains comprise mutations disclosed in Table 4, which promote ionic pairing, promote a knob-in-hole interaction, or a combination thereof of the Fc domains. In embodiments, the “Chain 1” and “Chain 2” of Table 4 can be interchanged (e.g. Chain 1 can have Y407T and Chain 2 can have T366Y).

TABLE 4

| Chain 1 mutation | Chain 2 mutation | Reference | IgG |
|---|---|---|---|
| T366Y | Y407T | Ridgway et al., 1996 Protein | IgG1 |
| | | Engineering, Design and Selection, | |
| | | Volume 9, Issue 7, 1 Jul. 1996, | |
| | | Pages 617-62 | |
| T366Y/F405A | T394W/Y407T | Ridgway et al., 1996 Protein | IgG1 |
| | | Engineering, Design and Selection, | |
| | | Volume 9, Issue 7, 1 Jul. 1996, | |
| | | Pages 617-62 | |
| T366W | Y407A | Atwell et al., 1997 JMB | IgG1 |
| | | Volume 270, Issue 1, 4 Jul. 1997, | |
| | | Pages 26-35 | |
| T366W | T3665/L368V/Y407A | Atwell et al., 1997 JMB | IgG1 |
| | | Volume 270, Issue 1, 4 Jul. 1997, | |
| | | Pages 26-35 | |
| T366W | L368A/Y407A | Atwell et al., 1997 JMB | IgG1 |
| | | Volume 270, Issue 1, 4 Jul. 1997, | |
| | | Pages 26-35 | |
| T366W | T366S/L368A/Y407A | Atwell et al., 1997 JMB | IgG1 |
| | | Volume 270, Issue 1, 4 Jul. 1997, | |
| | | Pages 26-35 | |
| T366W | T366S/L368G/Y407V | Atwell et al., 1997 JMB | IgG1 |
| | | Volume 270, Issue 1, 4 Jul. 1997, | |
| | | Pages 26-35 | |
| T366W/D3990 | T366S/L368A/ | Merchant et al., 1998 Nature | IgG1 |
| | K392C/Y407V | Biotechnology volume 16, | |
| | | pages 677-681 (1998) | |
| T366W/K3920 | T366S/L368A/ | Merchant et al., 1998 Nature | IgG1 |
| | D399C/Y407V | Biotechnology volume 16, | |
| | | pages 677-681 (1998) | |
| S354C/T366W | Y349C/T366S/ | Merchant et al., 1998 Nature | IgG1 |
| | L368A/Y407V | Biotechnology volume 16, | |
| | | pages 677-681 (1998) | |
| Y349C/T366W | S354C/T366S/ | Merchant et al., 1998 Nature | IgG1 |
| | L368A/Y407V | Biotechnology volume 16, | |
| | | pages 677-681 (1998) | |
| E356C/T366W | Y349C/T366S/ | Merchant et al., 1998 Nature | IgG1 |
| | L368A/Y407V | Biotechnology volume 16, | |
| | | pages 677-681 (1998) | |
| Y349C/T366W | E356C/T366S/ | Merchant et al., 1998 Nature | IgG1 |
| | L368A/Y407V | Biotechnology volume 16, | |
| | | pages 677-681 (1998) | |
| E357C/T366W | Y349C/T366S/ | Merchant et al., 1998 Nature | IgG1 |
| | L368A/Y407V | Biotechnology volume 16, | |
| | | pages 677-681 (1998) | |
| Y349C/T366W | E357C/T366S/ | Merchant et al., 1998 Nature | IgG1 |
| | L368A/Y407V | Biotechnology volume 16, | |
| | | pages 677-681 (1998) | |
| D339R | K409E | Gunasekaran et al., 2010 The Journal of | IgG1 |
| | | Biological Chemistry 285, 19637-19646. | |
| D339K | K409E | Gunasekaran et al., 2010 The Journal of | IgG1 |
| | | Biological Chemistry 285, 19637-19646. | |
| D339R | K409D | Gunasekaran et al., 2010 The Journal of | IgG1 |
| | | Biological Chemistry 285, 19637-19646. | |
| D339K | K409D | Gunasekaran et al., 2010 The Journal of | IgG1 |
| | | Biological Chemistry 285, 19637-19646. | |
| D339K | K360D/K409E | Gunasekaran et al., 2010 The Journal of | IgG1 |
| | | Biological Chemistry 285, 19637-19646. | |
| D339K | K392D/K409E | Gunasekaran et al., 2010 The Journal of | IgG1 |
| | | Biological Chemistry 285, 19637-19646. | |
| D339K/E356K | K392D/K409E | Gunasekaran et al., 2010 The Journal of | IgG1 |
| | | Biological Chemistry 285, 19637-19646. | |
| D339K/E357K | K392D/K409E | Gunasekaran et al., 2010 The Journal of | IgG1 |
| | | Biological Chemistry 285, 19637-19646. | |
| D339K/E356K | K409E/K439D | Gunasekaran et al., 2010 The Journal of | IgG1 |
| | | Biological Chemistry 285, 19637-19646. | |
| D339K/E357K | K370D/K409E | Gunasekaran et al., 2010 The Journal of | IgG1 |
| | | Biological Chemistry 285, 19637-19646. | |
| D339K/E356K/E357K | K370D/K392D/K409E | Gunasekaran et al., 2010 The Journal of | IgG1 |
| | | Biological Chemistry 285, 19637-19646. | |
| S364H/F405A | Y349T/T394F | Moore et al., 2011 mAbs, 3:6, 546-557 | IgG1 |
| S364H/T394F | Y349T/F405A | Moore et al., 2011 mAbs, 3:6, 546-557 | IgG1 |
| D221R/P228R/K409R | D221E/P228E/L368E | Strop et al., 2012 JMB Volume 420, | IgG1 |
| | | Issue 3, 13 Jul. 2012, Pages 204-219 | |
| C223R/E225R/ | C223E/P228E/L368E | Strop et al., 2012 JMB Volume 420, | IgG2 |
| P228R/K409R | | Issue 3, 13 Jul. 2012, Pages 204-219 | |
| F405L | K409R | Labrijn et al. 2013 PNAS March 26, | IgG1 |
| | | 2013. 110 (13) 5145-5150 | |
| F405A/Y407V | T394W | Von Kreudenstein et al., 2013 mAbs | IgG1 |
| | | Volume 5, 2013 - Issue 5, pp.644-654 | |
| F405A/Y407V | T366I/T394W | Von Kreudenstein et al., 2013 mAbs | IgG1 |
| | | Volume 5, 2013 - Issue 5, pp.644-654 | |
| F405A/Y407V | T366L/T394W | Von Kreudenstein et al., 2013 mAbs | IgG1 |
| | | Volume 5, 2013 - Issue 5, pp.644-654 | |
| F405A/Y407V | T366L/K392M/T394W | Von Kreudenstein et al., 2013 mAbs | IgG1 |
| | | Volume 5, 2013 - Issue 5, pp.644-654 | |
| L351Y/F405A/Y407V | T366L/K392M/T394W | Von Kreudenstein et al., 2013 mAbs | IgG1 |
| | | Volume 5, 2013 - Issue 5, pp.644-654 | |
| T350V/L351Y/ | T350V/T366L/ | Von Kreudenstein et al., 2013 mAbs | IgG1 |
| F405A/Y407V | K392M/T394W | Volume 5, 2013 - Issue 5, pp.644-654 | |
| T350V/L351Y/ | T350V/T366L/ | Von Kreudenstein et al., 2013 mAbs | IgG1 |
| F405A/Y407V | K392L/T394W | Volume 5, 2013 - Issue 5, pp.644-654 | |
| K409W | D339V/F405T | Choi et al., 2013 PNAS Jan. 2, 2013. | IgG1 |
| | | 110 (1) 270-275 | |
| K360E | Q347R | Choi et al., 2013 PNAS Jan. 2, 2013. | IgG1 |
| | | 110 (1) 270-275 | |
| K360E/K409W | D339V/Q347R/F405T | Choi et al., 2013 PNAS Jan. 2, 2013. | IgG1 |
| | | 110 (1) 270-275 | |
| Y349C/K360E/K409W | D339V/Q347R/ | Choi et al., 2013 PNAS Jan. 2, 2013. | IgG1 |
| | S3540/F405T | 110 (1) 270-275 | |
| K392A/K409D | E356K/D399K | Leaver-Fey et al., 2016 Structure | IgG1 |
| | | Volume 24, Issue 4, 5 Apr. 2016, | |
| | | Pages 641-651 | |
| T366W | T3665/L358A/Y407A | Leaver-Fey et al., 2016 Structure | IgG1 |
| | | Volume 24, Issue 4, 5 Apr. 2016, | |
| | | Pages 641-651 | |
| D339M/Y407A | T336V/K409V | Leaver-Fey et al., 2016 Structure | IgG1 |
| | | Volume 24, Issue 4, 5 Apr. 2016, | |
| | | Pages 641-651 | |
| D339M/K360D/ | T336V/E345R/ | Leaver-Fey et al., 2016 Structure | IgG1 |
| Y407A | Q347R/K409V | Volume 24, Issue 4, 5 Apr. 2016, | |
| | | Pages 641-651 | |
| Y349S/T366V/ | E357D/S364Q/Y407A | Leaver-Fey et al., 2016 Structure | IgG1 |
| K370Y/K409V | | Volume 24, Issue 4, 5 Apr. 2016, | |
| | | Pages 641-651 | |
| Y349S/T366M/ | E356G/E357D/ | Leaver-Fey et al., 2016 Structure | IgG1 |
| K370Y/K409V | S364Q/Y407A | Volume 24, Issue 4, 5 Apr. 2016, | |
| | | Pages 641-651 | |
| Y349S/T366M/ | E357D/5364R/Y407A | Leaver-Fey et al., 2016 Structure | IgG1 |
| K370Y/K409V | | Volume 24, Issue 4, 5 Apr. 2016, | |
| | | Pages 641-651 | |

And any combination as described in Tables 1-3 of US20150284475A1

[0106] By way of example, in some embodiments, a human IgG Fc domains comprise mutations disclosed in Table 5, which reduce or eliminate FcγR and/or complement binding in the Fc domain. In embodiments, the table 5 mutations are in both chains.

TABLE 5

| Chain 1 mutation | Reference | IgG |
|---|---|---|
| L234A/L235A | Alegre etal., 1994 | IgG1 |
| | Transplantation 57: | |
| | 1537-1543 | |
| F234A/L235A | Alegre et al., 1994 | IgG4 |
| | Transplantation 57: | |
| | 1537-1543 | |
| L235E | Morgan et al., 1995 | IgG1 |
| | Immunology. 1995 Oct; | |
| | 86 (2): 319-324. | |
| L235E | Morgan et al., 1995 | IgG4 |
| | Immunology. 1995 Oct; | |
| | 86 (2): 319-324. | |
| L235A | Morgan et al., 1995 | IgG1 |
| | Immunology. 1995 Oct; | |
| | 86 (2): 319-324. | |
| G237A | Morgan et al., 1995 | IgG1 |
| | Immunology. 1995 Oct; | |
| | 86 (2): 319-324. | |
| N297H | Tao and Morrison, | IgG1 |
| | J. Immunol. 1989; 143: | |
| | 2595-2601 | |
| N297Q | Tao and Morrison, | IgG1 |
| | J. Immunol. 1989; 143: | |
| | 2595-2601 | |
| N297K | Tao and Morrison, | IgG3 |
| | J. Immunol. 1989; 143: | |
| | 2595-2601 | |
| N297Q | Tao and Morrison, | IgG3 |
| | J. Immunol. 1989; 143: | |
| | 2595-2601 | |
| D265A | ldusogie et al., 2000 J | IgG1 |
| | Immunol Apr. 15, 2000, 164 | |
| | (8) 4178-4184 | |
| D270A, V, K | ldusogie et al., 2000 J | IgG1 |
| | Immunol Apr. 15, 2000, 164 | |
| | (8) 4178-4184 | |
| K322A, L, M, D, E | ldusogie et al., 2000 J | IgG1 |
| | Immunol Apr. 15, 2000, 164 | |
| | (8) 4178-4184 | |
| P329A, X | ldusogie et al., 2000 J | IgG1 |
| | Immunol Apr. 15, 2000, 164 | |
| | (8) 4178-4184 | |
| P331A, S, G, X | ldusogie et al., 2000 J | IgG1 |
| | Immunol Apr. 15, 2000, 164 | |
| | (8) 4178-4184 | |
| D265A | ldusogie et al., 2000 J | IgG1 |
| | Immunol Apr. 15, 2000, 164 | |
| | (8) 4178-4184 | |
| L234A | Hezareh et al., 2001 J. Virol. | IgG1 |
| | December 2001 vol. 75 no. | |
| | 24 12161-12168 | |
| L234A/L235A | Hezareh et al., 2001 J. Virol. | IgG1 |
| | December 2001 vol. 75 no. | |
| | 24 12161-12168 | |
| L234F/L235E/P331S | Oganesyan et al., 2008 Acta | IaG1 |
| | Cryst. (2008). D64, 700-704 | |
| H268Q/V309L/ | An et al., 2009 mAbs | IgG1 |
| A330S/P331S | Volume 1, 2009 - Issue 6, | |
| | pp. 572-579 | |
| G236R/L328R | Moore et al., 2011 mAbs | IgG1 |
| | Volume 3, 2011 - Issue 6, | |
| | pp. 546-557 | |
| N297G | Couch et al., 2013 Sci. | IgG1 |
| | Transl. Med., 5 (2013) | |
| | 183ra57, 1-12 | |
| N297G/D265A | Couch et al., 2013 Sci. | IgG1 |
| | Transl. Med., 5 (2013) | |
| | 183ra57, 1-12 | |
| V234A/G237A/P328S/ | Vafa et al., 2014 Methods | IgG2 |
| H268A/V309L/A330S/ | Volume 65, Issue 1, | |
| P331S | 1 Jan. 2014, Pages 114-126 | |
| L234A/L235A/P329G | Lo et al., 2016 The Journal | IgG1 |
| | of Biological Chemistry | |
| | 292, 3900-3908 | |
| N297D | Schlothauer et al., 2016 | IgG1 |
| | Protein Engineering, Design | |
| | and Selection, Volume 29, | |
| | Issue 10, 1 Oct. 2016, | |
| | Pages 457-466 | |
| S228P/L235E | Schlothauer et al., 2016 | IgG4 |
| | Protein Engineering, Design | |
| | and Selection, Volume 29, | |
| | Issue 10, 1 Oct. 2016, | |
| | Pages 457-466 | |
| S228P/L235E/P329G | Schlothauer et al., 2016 | IgG4 |
| | Protein Engineering, Design | |
| | and Selection, Volume 29, | |
| | Issue 10, 1 Oct. 2016, | |
| | Pages 457-466 | |
| L234F/L235A/K322Q | Borrok et al., 2017 J Pharm | IgG1 |
| | Sci April 2017 Volume 106, | |
| | Issue 4, Pages 1008-1017 | |
| L234F/L235Q/P331G | Borrok et al., 2017 J Pharm | IgG1 |
| | Sci April 2017 Volume 106, | |
| | Issue 4, Pages 1008-1017 | |
| L234F/L235Q/K322Q | Borrok et al., 2017 J Pharm | IgG1 |
| | Sci April 2017 Volume 106, | |
| | Issue 4, Pages 1008-1017 | |
| L234A/L235A/ | Tam et al., 2017 Open | IgG1 |
| G237A/P328S/ | Access | |
| H268A/A330S/ | Antibodies 2017, 6 (3), 12; | |
| P331S | doi:10.3390/antib6030012 | |
| S228P/F234A/L235A | Tam et al., 2017 Open | IgG4 |
| | Access | |
| | Antibodies 2017, 6 (3), 12; | |
| | doi:10.3390/antib6030012 | |
| S228P/F234A/ | Tam et al., 2017 Open | IgG4 |
| L235A/G237A/ | Access | |
| P238S | Antibodies 2017, 6 (3), 12; | |
| | doi:10.3390/antib6030012 | |
| S228P/F234A/ | Tam et al., 2017 Open | IgG4 |
| L235A/G236 [symbol] / | Access | |
| G237A/P238S | Antibodies 2017, 6 (3), 12; | |
| | doi:10.3390/antib6030012 | |

[0107] In some embodiments, the Fc domains in the Fc-based chimeric protein complexes of the present technology are homodimeric, i.e., the Fc domain in the chimeric protein complex comprises two identical protein chains.

[0108] In some embodiments, the Fc domains in the Fc-based chimeric protein complexes of the present technology are heterodimeric, i.e., the Fc domain in the chimeric protein complex comprises two non-identical protein chains.

[0109] In some embodiments, heterodimeric Fc domains are engineered using ionic pairing and/or knob-in-hole mutations described herein. In some embodiments, the heterodimeric Fc-based chimeric protein complexes have a trans orientation/configuration. In a trans orientation/configuration, the targeting moiety and signaling agent are, in embodiments, not found on the same polypeptide chain in the present Fc-based chimeric protein complexes. In some embodiments, the signaling agent and targeting moiety are on the same end (N-terminus or C-terminus) of the Fc domain. In some embodiments, the signaling agent and targeting moiety are on different ends (N-terminus or C-terminus) of the Fc domain.

[0110] In some embodiments, heterodimeric Fc domains are engineered using ionic pairing and/or knob-in-hole mutations described herein. In some embodiments, the heterodimeric Fc-based chimeric protein complexes have a trans orientation.

[0111] In a trans orientation, the targeting moiety and signaling agent are, in embodiments, not found on the same polypeptide chain in the present Fc-based chimeric protein complexes. In a trans orientation, the targeting moiety and signaling agent are, in embodiments, found on separate polypeptide chains in the Fc-based chimeric protein complexes. In a cis orientation, the targeting moiety and signaling agent are, in embodiments, found on the same polypeptide chain in the Fc-based chimeric protein complexes.

[0112] In some embodiments, where more than one targeting moiety is present in the heterodimeric protein complexes described herein, one targeting moiety may be in trans orientation (relative to the signaling agent), whereas another targeting moiety may be in cis orientation (relative to the signaling agent). In some embodiments, the signaling agent and target moiety are on the same ends/sides (N-terminal or C-terminal ends) of an Fc domain. In some embodiments, the signaling agent and targeting moiety are on different sides/ends of an Fc domain (N-terminal and C-terminal ends).

[0113] In some embodiments, where more than one targeting moiety is present in the heterodimeric protein complexes described herein, the targeting moieties may be found on the same Fc chain or on two different Fc chains in the heterodimeric protein complex (in the latter case the targeting moieties would be in trans relative to each other, as they are on different Fc chains). In some embodiments, where more than one targeting moiety is present on the same Fc chain, the targeting moieties may be on the same or different sides/ends of an Fc chain (N-terminal or/and C-terminal ends).

[0114] In some embodiments, where more than one signaling agent is present in the heterodimeric protein complexes described herein, the signaling agents may be found on the same Fc chain or on two different Fc chains in the heterodimeric protein complex (in the latter case the signaling agents would be in trans relative to each other, as they are on different Fc chains). In some embodiments, where more than one signaling agent is present on the same Fc chain, the signaling agents may be on the same or different sides/ends of an Fc chain (N-terminal or/and C-terminal ends).

[0115] In some embodiments, where more than one signaling agent is present in the heterodimeric protein complexes described herein, one signaling agent may be in trans orientation (as relates to the targeting moiety), whereas another signaling agent may be in cis orientation (as relates to the targeting moiety).

[0116] In some embodiments, the Fc domains include or start with the core hinge region of wild-type human IgG1, which contains the sequence Cys-Pro-Pro-Cys (SEQ ID NO: 1341). In some embodiments, the Fc domains also include the upper hinge, or parts thereof (e.g., DKTHTCPPC (SEQ ID NO: 1342; see WO2009053368), EPKSCDKTHTCPPC (SEQ ID NO: 1343), or EPKSSDKTHTCPPC (SEQ ID NO: 1344; see Lo et al., Protein Engineering vol. 11 no. 6 pp. 495-500, 1998)).

### Signaling Agents (SA)

[0117] In some embodiments, the Fc-based chimeric protein complexes of the present technology include one or more signaling agents (SA). The signaling agents, as disclosed herein, can be a wild type signaling agent or a modified signaling agent.

[0118] In various embodiments, the Fc-based chimeric protein complex comprises a wild type signaling agent that has improved target selectivity and safety relative to a signaling agent which is not fused to an Fc, or a signaling agent which is not in the context of a complex, e.g., without limitation, a heterodimeric complex. In various embodiments, the Fc-based chimeric protein complex comprises a wild type signaling agent that has improved target selective activity relative to a signaling agent which is not fused to an Fc, or a signaling agent which is not in the context of a complex, e.g., without limitation, a heterodimeric complex. In various embodiments, the Fc-based chimeric protein complex allows for conditional activity.

[0119] In various embodiments, the Fc-based chimeric protein complex comprises a wild type signaling agent that has one or more of attenuated activity such as one or more of reduced binding affinity, reduced endogenous activity, and reduced specific bioactivity as compared to the signaling agent which is not fused to an Fc, or a signaling agent which is not in the context of a complex, e.g., without limitation, a heterodimeric complex.

[0120] In various embodiments, the Fc-based chimeric protein complex comprises a wild type signaling agent that has improved safety, e.g. reduced systemic toxicity, reduced side effects, and reduced off-target effects relative to a signaling agent which is not fused to an Fc, or a signaling agent which is not in the context of a complex, e.g., without limitation, a heterodimeric complex. In various embodiments, improved safety means that the present Fc-based chimeric protein provides lower toxicity (e.g. systemic toxicity and/or tissue/organ-associated toxicities); and/or lessened or substantially eliminated side effects; and/or increased tolerability, lessened or substantially eliminated adverse events; and/or reduced or substantially eliminated off-target effects; and/or an increased therapeutic window of the wild type signaling agent as compared to the signaling agent which is not fused to an Fc, or a signaling agent which is not in the context of a complex, e.g., without limitation, a heterodimeric complex.

[0121] In some embodiments, the reduced affinity or activity at the receptor is restorable by inclusion in the present complex having one or more of the targeting moieties as described herein.

[0122] In various embodiments, the Fc-based chimeric protein complex comprises a wild type signaling agent that has reduced, substantially reduced, or ablated affinity, e.g. binding (e.g. K_{D}) and/or activation (for instance, when the modified signaling agent is an agonist of its receptor, measurable as, for example, K_{A} and/or EC₅₀) and/or inhibition (for instance, when the modified signaling agent is an antagonist of its receptor, measurable as, for example, K_{I} and/or IC₅₀), for one or more of its receptors. In various embodiments, the reduced affinity at the signaling agent's receptor allows for attenuation of activity. In such embodiments, the modified signaling agent has about 1%, or about 3%, about 5%, about 10%, about 15%, about 20%, about 25%, about 30%, about 35%, about 40%, about 45%, about 50%, about 60%, about 65%, about 70%, about 75%, about 80%, about 85%, about 90%, about 95%, or about 10%-20%, about 20%-40%, about 50%, about 40%-60%, about 60%-80%, about 80%-100% of the affinity for the receptor as compared to the signaling agent which is not fused to an Fc, or a signaling agent which is not in the context of a complex, e.g., without limitation, a heterodimeric complex. In some embodiments, the binding affinity is at least about 2-fold lower, about 3-fold lower, about 4-fold lower, about 5-fold lower, about 6-fold lower, about 7-fold lower, about 8-fold lower, about 9-fold lower, at least about 10-fold lower, at least about 15-fold lower, at least about 20-fold lower, at least about 25-fold lower, at least about 30-fold lower, at least about 35-fold lower, at least about 40-fold lower, at least about 45-fold lower, at least about 50-fold lower, at least about 100-fold lower, at least about 150-fold lower, or about 10-50-fold lower, about 50-100-fold lower, about 100-150-fold lower, about 150-200-fold lower, or more than 200-fold lower as compared to the signaling agent which is not fused to an Fc, or a signaling agent which is not in the context of a complex, e.g., without limitation, a heterodimeric complex.

[0123] In various embodiments, the Fc-based chimeric protein complex comprises a wild type signaling agent that has reduced endogenous activity of the signaling agent to about 75%, or about 70%, or about 60%, or about 50%, or about 40%, or about 30%, or about 25%, or about 20%, or about 10%, or about 5%, or about 3%, or about 1%, e.g., as compared to the signaling agent which is not fused to an Fc, or a signaling agent which is not in the context of a complex, e.g., without limitation, a heterodimeric complex.

[0124] In various embodiments, the signaling agent has one or more mutations that confer improved target selectivity and safety relative to a wild type signaling agent. In various embodiments, the signaling agent has one or more mutations that confer improved target selective activity relative to a wild type signaling agent. In various embodiments, the signaling agent has one or more mutations that allow for conditional activity.

[0125] In various embodiments, the signaling agent is modified to have reduced affinity or activity for one or more of its receptors, which allows for attenuation of activity (inclusive of agonism or antagonism) and/or prevents non-specific signaling or undesirable sequestration of the Fc-based chimeric protein complex.

[0126] In various embodiments, the signaling agent is agonistic in its wild type form and bears one or more mutations that attenuate its agonistic activity.

[0127] In various embodiments, the signaling agent is antagonistic in its wild type form and bears one or more mutations that attenuate its antagonistic activity. In various embodiments, the signaling agent is antagonistic due to one or more mutations, e.g. an agonistic signaling agent is converted to an antagonistic signaling agent and, such a converted signaling agent, optionally, also bears one or more mutations that attenuate its antagonistic activity (e.g. as described in WO 2015/007520, the entire contents of which are hereby incorporated by reference).

[0128] Accordingly, in various embodiments, the signaling agent is a modified (e.g. mutant) form (e.g., having one or more mutations) of a wild type signaling agent. In various embodiments, the modifications (e.g. mutations) allow for the modified signaling agent to have one or more of attenuated activity such as one or more of reduced binding affinity, reduced endogenous activity, and reduced specific bioactivity as compared to the unmodified or unmutated signaling agent, i.e. the wild type form of the signaling agent (e.g. comparing the same signaling agent in a wild type form versus a modified or mutant form). In some embodiments, the mutations which attenuate or reduce binding or affinity include those mutations which substantially reduce or ablate binding or activity. In some embodiments, the mutations which attenuate or reduce binding or affinity are different from those mutations which substantially reduce or ablate binding or activity. Consequentially, in various embodiments, the mutations allow for the signaling agent to have improved safety, e.g. reduced systemic toxicity, reduced side effects, and reduced off-target effects relative to unmutated, i.e. wild type, signaling agent (e.g. comparing the same signaling agent in a wild type form versus a modified (e.g. mutant) form).

[0129] As described herein, the signaling agent may have improved safety due to one of more modifications, e.g. mutations. In various embodiments, improved safety means that the present Fc-based chimeric protein provides lower toxicity (e.g. systemic toxicity and/or tissue/organ-associated toxicities); and/or lessened or substantially eliminated side effects; and/or increased tolerability, lessened or substantially eliminated adverse events; and/or reduced or substantially eliminated off-target effects; and/or an increased therapeutic window.

[0130] In various embodiments, the signaling agent is modified to have one or more mutations that reduce its binding affinity or activity for one or more of its receptors. In some embodiments, the signaling agent is modified to have one or more mutations that substantially reduce or ablate binding affinity or activity for the receptors. In some embodiments, the activity provided by the wild type signaling agent is agonism at the receptor (e.g. activation of a cellular effect at a site of therapy). For example, the wild type signaling agent may activate its receptor. In such embodiments, the mutations result in the modified signaling agent to have reduced or ablated activating activity at the receptor. For example, the mutations may result in the modified signaling agent to deliver a reduced activating signal to a target cell or the activating signal could be ablated. In some embodiments, the activity provided by the wild type signaling agent is antagonism at the receptor (e.g. blocking or dampening of a cellular effect at a site of therapy). For example, the wild type signaling agent may antagonize or inhibit the receptor. In these embodiments, the mutations result in the modified signaling agent to have a reduced or ablated antagonizing activity at the receptor. For example, the mutations may result in the modified signaling agent to deliver a reduced inhibitory signal to a target cell or the inhibitory signal could be ablated. In various embodiments, the signaling agent is antagonistic due to one or more mutations, e.g. an agonistic signaling agent is converted to an antagonistic signaling agent (e.g. as described in WO 2015/007520, the entire contents of which are hereby incorporated by reference) and, such a converted signaling agent, optionally, also bears one or more mutations that reduce its binding affinity or activity for one or more of its receptors or that substantially reduce or ablate binding affinity or activity for one or more of its receptors.

[0131] In some embodiments, the reduced affinity or activity at the receptor is restorable by inclusion in the present complex having one or more of the targeting moieties as described herein. In other embodiments, the reduced affinity or activity at the receptor is not substantially restorable by the activity of one or more of the targeting moieties.

[0132] In various embodiments, the Fc-based chimeric protein complex of the present technology reduces off-target effects because their signaling agents have mutations that weaken or ablate binding affinity or activity at a receptor.

[0133] In various embodiments, this reduction in side effects is observed relative with, for example, the wild type signaling agents. In various embodiments, the signaling agent is active on target cells because the targeting moiety(ies) compensates for the missing/insufficient binding (e.g., without limitation and/or avidity) required for substantial activation. In various embodiments, the wild type or modified signaling agent is substantially inactive en route to the site of therapeutic activity and has its effect substantially on specifically targeted cell types which greatly reduces cross-reactivities and/or potentially associated side effects.

[0134] In some embodiments, the signaling agent may include one or more mutations that attenuate or reduce binding or affinity for one receptor (i.e., a therapeutic receptor) and one or more mutations that substantially reduce or ablate binding or activity at a second receptor. In such embodiments, these mutations may be at the same or at different positions (i.e., the same mutation or multiple mutations). In some embodiments, the mutation(s) that reduce binding and/or activity at one receptor is different from the mutation(s) that substantially reduce or ablate at another receptor. In some embodiments, the mutation(s) that reduce binding and/or activity at one receptor is the same as the mutation(s) that substantially reduce or ablate at another receptor. In some embodiments, the present Fc-based chimeric protein complexes have a modified signaling agent that has both mutations that attenuate binding and/or activity at a therapeutic receptor and therefore allow for a more controlled, on-target therapeutic effect (e.g. relative wild type signaling agent) and mutations that substantially reduce or ablate binding and/or activity at another receptor and therefore reduce side effects (e.g. relative to wild type signaling agent).

[0135] In some embodiments, the substantial reduction or ablation of binding or activity is not substantially restorable with a targeting moiety described herein. In some embodiments, the substantial reduction or ablation of binding or activity is restorable with a targeting moiety. In various embodiments, substantially reducing or ablating binding or activity at a second receptor also may prevent deleterious effects that are mediated by the other receptor. Alternatively, or in addition, substantially reducing or ablating binding or activity at the other receptor causes the therapeutic effect to improve as there is a reduced or eliminated sequestration of the therapeutic Fc-based chimeric protein complexes away from the site of therapeutic action. For instance, in some embodiments, this obviates the need of high doses of the present Fc-based chimeric protein complexes that compensate for loss at the other receptor. Such ability to reduce dose further provides a lower likelihood of side effects.

[0136] In various embodiments, the modified signaling agent comprises one or more mutations that cause the signaling agent to have reduced, substantially reduced, or ablated affinity, e.g. binding (e.g. K_{D}) and/or activation (for instance, when the modified signaling agent is an agonist of its receptor, measurable as, for example, K_{A} and/or EC₅₀) and/or inhibition (for instance, when the modified signaling agent is an antagonist of its receptor, measurable as, for example, K_{I} and/or IC₅₀), for one or more of its receptors. In various embodiments, the reduced affinity at the signaling agent's receptor allows for attenuation of activity (inclusive of agonism or antagonism). In such embodiments, the modified signaling agent has about 1%, or about 3%, about 5%, about 10%, about 15%, about 20%, about 25%, about 30%, about 35%, about 40%, about 45%, about 50%, about 60%, about 65%, about 70%, about 75%, about 80%, about 85%, about 90%, about 95%, or about 10%-20%, about 20%-40%, about 50%, about 40%-60%, about 60%-80%, about 80%-100% of the affinity for the receptor relative to the wild type signaling agent. In some embodiments, the binding affinity is at least about 2-fold lower, about 3-fold lower, about 4-fold lower, about 5-fold lower, about 6-fold lower, about 7-fold lower, about 8-fold lower, about 9-fold lower, at least about 10-fold lower, at least about 15-fold lower, at least about 20-fold lower, at least about 25-fold lower, at least about 30-fold lower, at least about 35-fold lower, at least about 40-fold lower, at least about 45-fold lower, at least about 50-fold lower, at least about 100-fold lower, at least about 150-fold lower, or about 10-50-fold lower, about 50-100-fold lower, about 100-150-fold lower, about 150-200-fold lower, or more than 200-fold lower relative to the wild type signaling agent.

[0137] In embodiments wherein the Fc-based chimeric protein complex comprises a modified signaling agent having mutations that reduce binding at one receptor and substantially reduce or ablate binding at a second receptor, the attenuation or reduction in binding affinity of the modified signaling agent for one receptor is less than the substantial reduction or ablation in affinity for the other receptor. In some embodiments, the attenuation or reduction in binding affinity of the modified signaling agent for one receptor is less than the substantial reduction or ablation in affinity for the other receptor by about 1%, or about 3%, about 5%, about 10%, about 15%, about 20%, about 25%, about 30%, about 35%, about 40%, about 45%, about 50%, about 60%, about 65%, about 70%, about 75%, about 80%, about 85%, about 90%, or about 95%. In various embodiments, substantial reduction or ablation refers to a greater reduction in binding affinity and/or activity than attenuation or reduction.

[0138] In various embodiments, the modified signaling agent comprises one or more mutations that reduce the endogenous activity of the signaling agent to about 75%, or about 70%, or about 60%, or about 50%, or about 40%, or about 30%, or about 25%, or about 20%, or about 10%, or about 5%, or about 3%, or about 1%, e.g., relative to the wild type signaling agent.

[0139] In some embodiments, the modified signaling agent comprises one or more mutations that cause the signaling agent to have reduced affinity for its receptor that is lower than the binding affinity of the targeting moiety(ies) for its(their) receptor(s). In some embodiments, this binding affinity differential is between signaling agent/receptor and targeting moiety/receptor on the same cell. In some embodiments, this binding affinity differential allows for the signaling agent, e.g. mutated signaling agent, to have localized, on-target effects and to minimize off-target effects that underlie side effects that are observed with wild type signaling agent. In some embodiments, this binding affinity is at least about 2-fold, or at least about 5-fold, or at least about 10-fold, or at least about 15-fold lower, or at least about 25-fold, or at least about 50-fold lower, or at least about 100-fold, or at least about 150-fold.

[0140] Receptor binding activity may be measured using methods known in the art. For example, affinity and/or binding activity may be assessed by Scatchard plot analysis and computer-fitting of binding data (e.g. Scatchard, The attractions of proteins for small molecules and ions. Ann NY Acad Sci 51: 660-672, 1949) or by reflectometric interference spectroscopy under flow through conditions, as described by Brecht et al. Biosens Bioelectron 1993; 8:387-392, the entire contents of all of which are hereby incorporated by reference.

[0141] The amino acid sequences of the wild type signaling agents described herein are well known in the art. Accordingly, in various embodiments the modified signaling agent comprises an amino acid sequence that has at least about 60%, or at least about 61%, or at least about 62%, or at least about 63%, or at least about 64%, or at least about 65%, or at least about 66%, or at least about 67%, or at least about 68%, or at least about 69%, or at least about 70%, or at least about 71%, or at least about 72%, or at least about 73%, or at least about 74%, or at least about 75%, or at least about 76%, or at least about 77%, or at least about 78%, or at least about 79%, or at least about 80%, or at least about 81%, or at least about 82%, or at least about 83%, or at least about 84%, or at least about 85%, or at least about 86%, or at least about 87%, or at least about 88%, or at least about 89%, or at least about 90%, or at least about 91%, or at least about 92%, or at least about 93%, or at least about 94%, or at least about 95%, or at least about 96%, or at least about 97%, or at least about 98%, or at least about 99% sequence identity with the known wild type amino acid sequences of the signaling agents described herein (e.g. about 60%, or about 61%, or about 62%, or about 63%, or about 64%, or about 65%, or about 66%, or about 67%, or about 68%, or about 69%, or about 70%, or about 71%, or about 72%, or about 73%, or about 74%, or about 75%, or about 76%, or about 77%, or about 78%, or about 79%, or about 80%, or about 81%, or about 82%, or about 83%, or about 84%, or about 85%, or about 86%, or about 87%, or about 88%, or about 89%, or about 90%, or about 91%, or about 92%, or about 93%, or about 94%, or about 95%, or about 96%, or about 97%, or about 98%, or about 99% sequence identity).

[0142] In various embodiments the modified signaling agent comprises an amino acid sequence that has at least about 60%, or at least about 61%, or at least about 62%, or at least about 63%, or at least about 64%, or at least about 65%, or at least about 66%, or at least about 67%, or at least about 68%, or at least about 69%, or at least about 70%, or at least about 71%, or at least about 72%, or at least about 73%, or at least about 74%, or at least about 75%, or at least about 76%, or at least about 77%, or at least about 78%, or at least about 79%, or at least about 80%, or at least about 81%, or at least about 82%, or at least about 83%, or at least about 84%, or at least about 85%, or at least about 86%, or at least about 87%, or at least about 88%, or at least about 89%, or at least about 90%, or at least about 91%, or at least about 92%, or at least about 93%, or at least about 94%, or at least about 95%, or at least about 96%, or at least about 97%, or at least about 98%, or at least about 99% sequence identity with any amino acid sequences of the signaling agents described herein (e.g. about 60%, or about 61%, or about 62%, or about 63%, or about 64%, or about 65%, or about 66%, or about 67%, or about 68%, or about 69%, or about 70%, or about 71%, or about 72%, or about 73%, or about 74%, or about 75%, or about 76%, or about 77%, or about 78%, or about 79%, or about 80%, or about 81%, or about 82%, or about 83%, or about 84%, or about 85%, or about 86%, or about 87%, or about 88%, or about 89%, or about 90%, or about 91%, or about 92%, or about 93%, or about 94%, or about 95%, or about 96%, or about 97%, or about 98%, or about 99% sequence identity).

[0143] In various embodiments, the modified signaling agent comprises an amino acid sequence having one or more amino acid mutations. In some embodiments, the one or more amino acid mutations may be independently selected from substitutions, insertions, deletions, and truncations. In some embodiments, the amino acid mutations are amino acid substitutions, and may include conservative and/or non-conservative substitutions, as described elsewhere herein.

[0144] In various embodiments, the modified signaling comprises a truncation of one or more amino acids, e.g. an N-terminal truncation and/or a C-terminal truncation.

[0145] In various embodiments, the substitutions may also include non-classical amino acids as described elsewhere herein.

[0146] As described herein, the modified signaling agents bear mutations that affect affinity and/or activity at one or more receptors. In various embodiments, there is reduced affinity and/or activity at a therapeutic receptor, e.g. a receptor through which a desired therapeutic effect is mediated (e.g. agonism or antagonism). In various embodiments, the modified signaling agents bear mutations that substantially reduce or ablate affinity and/or activity at a receptor, e.g. a receptor through which a desired therapeutic effect is not mediated (e.g. as the result of promiscuity of binding). The receptors of any signaling agents, as described herein, are known in the art.

[0147] Illustrative mutations which provide reduced affinity and/or activity (e.g. agonistic) at a receptor are found in WO 2013/107791 and PCT/EP2017/061544 (e.g. with regard to interferons), WO 2015/007542 (e.g. with regard to interleukins), and WO 2015/007903 (e.g. with regard to TNF), the entire contents of each of which are hereby incorporated by reference. Illustrative mutations which provide reduced affinity and/or activity (e.g. antagonistic) at a therapeutic receptor are found in WO 2015/007520, the entire contents of which are hereby incorporated by reference.

[0148] In various embodiments, the signaling agent is an immune-modulating agent, e.g. one or more of an interleukin, interferon, and tumor necrosis factor.

[0149] In some embodiments, the signaling agent is a wild type interleukin or a modified interleukin, including for example IL-1; IL-2; IL-3; IL-4; IL-5; IL-6; IL-7; IL-8; IL-9; IL-10; IL-11; IL-12; IL-13; IL-14; IL-15; IL-16; IL-17; IL-18; IL- 19; IL-20; IL-21; IL-22; IL-23; IL-24; IL-25; IL-26; IL-27; IL-28; IL-29; IL-30; IL-31; IL-32; IL-33; IL-35; IL-36 or a fragment, variant, analogue, or family-member thereof. Interleukins are a group of multi-functional cytokines synthesized by lymphocytes, monocytes, and macrophages. Known functions include stimulating proliferation of immune cells (e.g., T helper cells, B cells, eosinophils, and lymphocytes), chemotaxis of neutrophils and T lymphocytes, and/or inhibition of interferons. Interleukin activity can be determined using assays known in the art: Matthews et al., in Lymphokines and Interferons: A Practical Approach, Clemens et al., eds, IRL Press, Washington, D.C. 1987, pp. 221-225; and Orencole & Dinarello (1989) Cytokine 1, 14-20.

[0150] In some embodiments, the signaling agent is a wild type interferon or a modified version of an interferon such as interferon types I, II, and III. Illustrative interferons, including for example, interferon-α-1, 2, 4, 5, 6, 7, 8, 10, 13, 14, 16, 17, and 21, interferon-β and interferon-γ, interferon κ, interferon ε, interferon [symbol] , and interferon ω.

[0151] In some embodiments, the signaling agent is a wild type tumor necrosis factor (TNF) or a modified version of a tumor necrosis factor (TNF) or a protein in the TNF family, including but not limited to, TNF-α, TNF-β, LT-β, CD40L, CD27L, CD30L, FASL, 4-1BBL, OX40L, and TRAIL.

[0152] In some embodiments, the modified signaling agent comprises one or more mutations that cause the signaling agent to have reduced affinity and/or activity for a type I cytokine receptor, a type II cytokine receptor, a chemokine receptor, a receptor in the Tumor Necrosis Factor Receptor (TNFR) superfamily, TGF-beta Receptors, a receptor in the immunoglobulin (Ig) superfamily, and/or a receptor in the tyrosine kinase superfamily.

[0153] In various embodiments, the receptor for the signaling agent is a Type I cytokine receptor. Type I cytokine receptors are known in the art and include, but are not limited to receptors for IL2 (beta-subunit), IL3, IL4, IL5, IL6, IL7, IL9, IL11, IL12, GM-CSF, G-CSF, LIF, CNTF, and also the receptors for Thrombopoietin (TPO), Prolactin, and Growth hormone. Illustrative type I cytokine receptors include, but are not limited to, GM-CSF receptor, G-CSF receptor, LIF receptor, CNTF receptor, TPO receptor, and type I IL receptors.

[0154] In various embodiments, the receptor for the signaling agent is a Type II cytokine receptor. Type II cytokine receptors are multimeric receptors composed of heterologous subunits, and are receptors mainly for interferons. This family of receptors includes, but is not limited to, receptors for interferon-α, interferon-β and interferon-γ, IL10, 1L22, and tissue factor. Illustrative type II cytokine receptors include, but are not limited to, IFN-α receptor (e.g. IFNAR1 and IFNAR2), IFN-β receptor, IFN-γ receptor (e.g. IFNGR1 and IFNGR2), and type II IL receptors.

[0155] In various embodiments, the receptor for the signaling agent is a G protein-coupled receptor. Chemokine receptors are G protein-coupled receptors with seven transmembrane structure and coupled to G-protein for signal transduction. Chemokine receptors include, but are not limited to, CC chemokine receptors, CXC chemokine receptors, CX3C chemokine receptors, and XC chemokine receptor (XCR1). Exemplary chemokine receptors include, but are not limited to, CCR1, CCR2, CCR3, CCR4, CCR5, CCR6, CCR7, CCR8, CCR9, CCR10, CXCR1, CXCR2, CXCR3, CXCR3B, CXCR4, CXCR5, CSCR6, CXCR7, XCR1, and CX3CR1.

[0156] In various embodiments, the receptor for the signaling agent is a TNFR family member. Tumor necrosis factor receptor (TNFR) family members share a cysteine-rich domain (CRD) formed of three disulfide bonds surrounding a core motif of CXXCXXC creating an elongated molecule. Exemplary tumor necrosis factor receptor family members include: CDI 20a (TNFRSFIA), CD 120b (TNFRSFIB), Lymphotoxin beta receptor (LTBR, TNFRSF3), CD 134 (TNFRSF4), CD40 (CD40, TNFRSF5), FAS (FAS, TNFRSF6), TNFRSF6B (TNFRSF6B), CD27 (CD27, TNFRSF7), CD30 (TNFRSF8), CD137 (TNFRSF9), TNFRSFIOA (TNFRSFIOA), TNFRSFIOB, (TNFRSFIOB), TNFRSFIOC (TNFRSFIOC), TNFRSFIOD (TNFRSFIOD), RANK (TNFRSFI IA), Osteoprotegerin (TNFRSFI IB), TNFRSF12A (TNFRSF12A), TNFRSF13B (TNFRSF13B), TNFRSF13C (TNFRSF13C), TNFRSF14 (TNFRSF14), Nerve growth factor receptor (NGFR, TNFRSF16), TNFRSF17 (TNFRSF17), TNFRSF18 (TNFRSF18), TNFRSF19 (TNFRSF19), TNFRSF21 (TNFRSF21), and TNFRSF25 (TNFRSF25). In an embodiment, the TNFR family member is CD120a (TNFRSF1A) or TNF-R1. In another embodiment, the TNFR family member is CD 120b (TNFRSFIB) or TNF-R2.

[0157] In various embodiments, the receptor for the signaling agent is a TGF-beta receptor. TGF-beta receptors are single pass serine/threonine kinase receptors. TGF-beta receptors include, but are not limited to, TGFBR1, TGFBR2, and TGFBR3.

[0158] In various embodiments, the receptor for the signaling agent is an Ig superfamily receptor. Receptors in the immunoglobulin (Ig) superfamily share structural homology with immunoglobulins. Receptors in the Ig superfamily include, but are not limited to, interleukin-1 receptors, CSF-1R, PDGFR (e.g. PDGFRA and PDGFRB), and SCFR.

[0159] In various embodiments, the receptor for the signaling agent is a tyrosine kinase superfamily receptor. Receptors in the tyrosine kinase superfamily are well known in the art. There are about 58 known receptor tyrosine kinases (RTKs), grouped into 20 subfamilies. Receptors in the tyrosine kinase superfamily include, but are not limited to, FGF receptors and their various isoforms such as FGFR1, FGFR2, FGFR3, FGFR4, and FGFR5.

[0160] In embodiments, the interferon is a type I interferon. In embodiments, the type I interferon is selected from IFN-α2, IFN-α1, IFN-β, IFN-γ, Consensus IFN, IFN-ε, IFN-κ, IFN-τ, IFN-δ, and IFN-v.

[0161] In some embodiments, the signaling agent is a wild type interferon α or a modified interferon α. In embodiments, the modified IFN-α agent has reduced affinity and/or activity for the IFN-α/β receptor (IFNAR), i.e., IFNAR1 and/or IFNAR2 chains. In some embodiments, the modified IFN-α agent has substantially reduced or ablated affinity and/or activity for the IFN-α/β receptor (IFNAR), i.e., IFNAR1 and/or IFNAR2 chains.

[0162] Mutant forms of interferon α2 are known to the person skilled in the art. In an illustrative embodiment, the modified signaling agent is the allelic form IFN-α2a having the amino acid sequence of:

IFN-α2a:
(SEQ ID NO: 1)
CDLPQTHSLGSRRTLMLLAQMRKISLFSCLKDRHDFGFPQEEFGNQFQKA
ETIPVLHEMIQQIFNLFSTKDSSAAWDETLLDKFYTELYQQLNDLEACVI
QGVGVTETPLMKEDSILAVRKYFQRITLYLKEKKYSPCAWEVVRAEIMRS
FSLSTNLQESLRSKE.

[0163] In an illustrative embodiment, the modified signaling agent is the allelic form IFN-α2b having the amino acid sequence of (which differs from IFN-α2a at amino acid position 23):

IFN-α2b:
(SEQ ID NO: 2)
[sequence omitted]

[0164] In some embodiments, said IFN-α2 mutant (IFN-α2a or IFN-α2b) is mutated at one or more amino acids at positions 144-154, such as amino acid positions 148, 149 and/or 153. In some embodiments, the IFN-α2 mutant comprises one or more mutations selected from L153A, R149A, and M148A. Such mutants are described, for example, in WO2013/107791 and Piehler et al., (2000) J. Biol. Chem, 275:40425-33, the entire contents of all of which are hereby incorporated by reference.

[0165] In some embodiments, the IFN-α2 mutants have reduced affinity and/or activity for IFNAR1. In some embodiments, the IFN-α2 mutant comprises one or more mutations selected from F64A, N65A, T69A, L80A, Y85A, and Y89A, as described in WO2010/030671, the entire contents of which is hereby incorporated by reference.

[0166] In some embodiments, the IFN-α2 mutant comprises one or more mutations selected from K133A, R144A, R149A, and L153A as described in WO2008/124086, the entire contents of which is hereby incorporated by reference.

[0167] In some embodiments, the IFN-α2 mutant comprises one or more mutations selected from R120E and R120E/K121E, as described in WO2015/007520 and WO2010/030671, the entire contents of which are hereby incorporated by reference. In such embodiments, said IFN-α2 mutant antagonizes wildtype IFN-α2 activity. In such embodiments, said mutant IFN-α2 has reduced affinity and/or activity for IFNAR1 while affinity and/or activity of IFNR2 is retained.

[0168] In some embodiments, the human IFN-α2 mutant comprises (1) one or more mutations selected from R120E and R120E/K121E, which, without wishing to be bound by theory, create an antagonistic effect and (2) one or more mutations selected from K133A, R144A, R149A, and L153A, which, without wishing to be bound by theory, allow for an attenuated effect at, for example, IFNAR2. In an embodiment, the human IFN-α2 mutant comprises R120E and L153A.

[0169] In some embodiments, the human IFN-α2 mutant comprises one or more mutations selected from, L15A, A19W, R22A, R23A, S25A, L26A, F27A, L30A, L30V, K31A, D32A, R33K, R33A, R33Q, H34A, D35A, Q40A, D114R, L117A, R120A, R120E, R125A, R125E, K131A, E132A, K133A, K134A, R144A, A145G, A145M, M148A, R149A, S152A, L153A, and N156A as disclosed in WO 2013/059885 and WO 2016/065409, the entire disclosures of which are hereby incorporated by reference. In some embodiments, the human IFN-α2 mutant comprises the mutations H57Y, E58N, Q61S, and/or L30A as disclosed in WO 2013/059885. In some embodiments, the human IFN-α2 mutant comprises the mutations H57Y, E58N, Q61S, and/or R33A as disclosed in WO 2013/059885. In some embodiments, the human IFN-α2 mutant comprises the mutations H57Y, E58N, Q61S, and/or M148A as disclosed in WO 2013/059885. In some embodiments, the human IFN-α2 mutant comprises the mutations H57Y, E58N, Q61S, and/or L153A as disclosed in WO 2013/059885. In some embodiments, the human IFN-α2 mutant comprises the mutations N65A, L80A, Y85A, and/or Y89A as disclosed in WO 2013/059885. In some embodiments, the human IFN-α2 mutant comprises the mutations N65A, L80A, Y85A, Y89A, and/or D114A as disclosed in WO 2013/059885. In some embodiments, the human IFN-α2 mutant comprises one or more mutations selected from R144X₁, A145X₂, R33A and T106X₃, wherein X₁ is selected from A, S, T, Y, L, and I, and wherein X₂ is selected from G, H, Y, K, and D and wherein X₃ is selected from A and E.

[0170] In some embodiments, the human IFN-α2 mutant comprises one or more mutations at one of positions R33, R144, A145, M148, and L153. In some embodiments, the human IFN-α2 mutant comprises one or more mutations selected from R33A, R144A, R144I, R144L, R144S, R144T, R144Y, A145D, A145G, A145H, A145K, A145Y, M148A, and L153A.

[0171] In some embodiments, the human IFN-α2 mutant comprises one or more mutations selected from L15A, R22A, R23A, S25A, L26A, F27A, L30A, L30V, K31A, D32A, R33A, R33K, R33Q, H34A, Q40A, D113R, L116A, R119A, R119E, R124A, R124E, K130A, E131A, K132A, K133A, M147A, R148A, S 149A, L152A, N155A, (L30A, H57Y, E58N and Q61S), (M147A, H57Y, E58N and Q61S), (L152A, H57Y, E58N and Q61S), (R143A, H57Y, E58N and Q61S), (N65A, L80A, Y85A and Y89A,) (N65A, L80A, Y85A, Y89A and D113A), (N65A, L80A, Y85A, Y89A and L116A), (N65A, L80A, Y85A, Y89A and RI 190A), (Y85A, Y89A and D113A), (D113A and RI119A), (L116A and R119A), (L116A, R119A and K120A), (R119A and K120A), (R119E and K120E), replacement of R at position 143 with A, D, E, G, H, I, K, L, N, Q, S, T, V or Y, replacement of A at position 144 with D, E, G, H, I, K, L, M, N, Q, S, T, V or Y, and deletion of residues L160 to E164.

[0172] In some embodiments, the human IFN-α2 mutant comprises a mutation which does not permit O-linked glycosylation at a position when, e.g., produced in mammalian cell culture. In some embodiments, the human IFN-α2 mutant comprises a mutation at T106. In some embodiments, T106 is substituted with A, C, D, E, F, G, H, I, K, L, M, N, P, Q, R, S, V, W, or Y.

[0173] In some embodiments, the human IFN-α2 mutant is a mutant of the IFN-α2-1b variant. Mutations in the IFN-α2-1b variant are disclosed in WO 2015/168474, the entire disclosures of which are hereby incorporated by reference. By way of example, in some embodiments IFN-α2-1b comprises one or more of the following mutations: H58A, E59A, R145A, M149A, and R150A.

[0174] In some embodiments, the signaling agent is a wild type interferon α1 or a modified interferon α1. In some embodiments, the present invention provides a chimeric protein that includes a wild type IFNα1. In various embodiments, the wild-type IFNα1 comprises the following amino acid sequence:

(SEQ ID NO: 1562)
CDLPETHSLDNRRTLMLLAQMSRISPSSCLMDRHDFGFPQEEFDGNQFQK
APAISVLHELIQQIFNLFTTKDSSAAWDEDLLDKFCTELYQQLNDLEACV
MQEERVGETPLMNADSILAVKKYFRRITLYLTEKKYSPCAWEVVRAEIMR
SLSLSTNLQERLRRKE.

[0175] In various embodiments, the chimeric protein of the invention comprises a modified version of IFNα1, i.e., an IFNα1 variant including a IFNα1 mutant, as a signaling agent. In various embodiments, the IFNα1 variant encompasses mutants, functional derivatives, analogs, precursors, isoforms, splice variants, or fragments of the interferon.

[0176] In some embodiments, the IFNα1 interferon is modified to have a mutation at one or more amino acids at positions L15, A19, R23, S25, L30, D32, R33, H34, Q40, C86, D115, L118, K121, R126, E133, K134, K135, R145, A146, M149, R150, S153, L154, and N157 with reference to SEQ ID NO: 1562. The mutations can optionally be a hydrophobic mutation and can be, e.g., selected from alanine, valine, leucine, and isoleucine. In some embodiments, the IFNα1 interferon is modified to have a one or more mutations selected from L15A, A19W, R23A, S25A, L30A, L30V, D32A, R33K, R33A, R33Q, H34A, Q40A, C86S, C86A, D115R, L118A, K121A, K121E, R126A, R126E, E133A, K134A, K135A, R145A, R145D, R145E, R145G, R145H, R1451, R145K, R145L, R145N, R145Q, R145S, R145T, R145V, R145Y, A146D, A146E, A146G, A146H, A1461, A146K, A146L, A146M, A146N, A146Q, A146R, A146S, A146T, A146V, A146Y, M149A, R150A, S153A, L154A, and N157A with reference to SEQ ID NO: 1562. In some embodiments, the IFNα1 mutant comprises one or more multiple mutations selected from L30A/H58Y/E59N_Q62S, R33A/H58Y/E59N/Q62S, M149A/H58Y/E59N/Q62S, L154A/H58Y/E59N/Q62S, R145A/H58Y/E59N/Q62S, D115A/R121A, L118A/R121A, L118A/R121A/K122A, R121A/K122A, and R121E/K122E with reference to SEQ ID NO: 1562).

[0177] In an embodiment, the IFNα1 interferon is modified to have a mutation at amino acid position C86 with reference to SEQ ID NO: 1562. The mutation at position C86 can be, e.g., C86S or C86A. These C86 mutants of IFNα1 are called reduced cysteine based aggregation mutants.

[0178] In some embodiments, the signaling agent is a wild type interferon β or modified interferon β. In such embodiments, the modified interferon β agent has reduced affinity and/or activity for the IFN-α/β receptor (IFNAR), i.e., IFNAR1 and/or IFNAR2 chains. In some embodiments, the modified interferon β agent has substantially reduced or ablated affinity and/or activity for the IFN-α/β receptor (IFNAR), i.e., IFNAR1 and/or IFNAR2 chains.

[0179] In an illustrative embodiment, the modified signaling agent is IFN-β. In various embodiments, the IFN-β encompasses functional derivatives, analogs, precursors, isoforms, splice variants, or fragments of IFN-β. In various embodiments, the IFN-β encompasses IFN-β derived from any species. In an embodiment, the Fc-based chimeric protein complex comprises a modified version of mouse IFN-β. In another embodiment, the Fc-based chimeric protein complex comprises a modified version of human IFN-β. Human IFN-β is a polypeptide with a molecular weight of about 22 kDa comprising 166 amino acid residues. The amino acid sequence of human IFN-β is:

(SEQ ID NO: 3)
MSYNLLGFLQRSSNFQCQKLLWQLNGRLEYCLKDRMNFDIPEEIKQLQQF
QKEDAALTIYEMLQNIFAIFRQDSSSTGWNETIVENLLANVYHQINHLKT
VLEEKLEKEDFTRGKLMSSLHLKRYYGRILHYLKAKEYSHCAWTIVRVEI
LRNFYFINRLTGYLRN.

[0180] In some embodiments, the human IFN-β is IFN-β-1a that is a glycosylated form of human IFN-β. In some embodiments, the human IFN-β is IFN-β-1b that is a non-glycosylated form of human IFN-β that has a Met-1 deletion and a Cys-17 to Ser mutation.

[0181] In various embodiments, the modified IFN-β has one or more mutations that reduce its binding to or its affinity for the IFNAR1 subunit of IFNAR. In one embodiment, the modified IFN-β has reduced affinity and/or activity at IFNAR1. In various embodiments, the modified IFN-β is human IFN-β and has one or more mutations at positions F67, R71, L88, Y92, I95, N96, K123, and R124. In some embodiments, the one or more mutations are substitutions selected from F67G, F67S, R71A, L88G, L88S, Y92G, Y92S, I95A, N96G, K123G, and R124G. In an embodiment, the modified IFN-β comprises the F67G mutation. In an embodiment, the modified IFN-β comprises the K123G mutation. In an embodiment, the modified IFN-β comprises the F67G and R71A mutations. In an embodiment, the modified IFN-β comprises the L88G and Y92G mutations. In an embodiment, the modified IFN-β comprises the Y92G, I95A, and N96G mutations. In an embodiment, the modified IFN-β comprises the K123G and R124G mutations. In an embodiment, the modified IFN-β comprises the F67G, L88G, and Y92G mutations. In an embodiment, the modified IFN-β comprises the F67S, L88S, and Y92S mutations.

[0182] In some embodiments, the modified IFN-β has one or more mutations that reduce its binding to or its affinity for the IFNAR2 subunit of IFNAR. In one embodiment, the modified IFN-β has reduced affinity and/or activity at IFNAR2. In various embodiments, the modified IFN-β is human IFN-β and has one or more mutations at positions W22, R27, L32, R35, V148, L151, R152, and Y155. In some embodiments, the one or more mutations are substitutions selected from W22G, R27G, L32A, L32G, R35A, R35G, V148G, L151G, R152A, R152G, and Y155G.

[0183] In an embodiment, the modified IFN-β comprises the W22G mutation. In an embodiment, the modified IFN-β comprises the L32A mutation. In an embodiment, the modified IFN-β comprises the L32G mutation. In an embodiment, the modified IFN-β comprises the R35A mutation. In an embodiment, the modified IFN-β comprises the R35G mutation. In an embodiment, the modified IFN-β comprises the V148G mutation. In an embodiment, the modified IFN-β comprises the R152A mutation. In an embodiment, the modified IFN-β comprises the R152G mutation. In an embodiment, the modified IFN-β comprises the Y155G mutation. In an embodiment, the modified IFN-β comprises the W22G and R27G mutations. In an embodiment, the modified IFN-β comprises the L32A and R35A mutation. In an embodiment, the modified IFN-β comprises the L151G and R152A mutations. In an embodiment, the modified IFN-β comprises the V148G and R152A mutations.

[0184] In some embodiments, the modified IFN-β has one or more of the following mutations: R35A, R35T, E42K, M621, G78S, A141Y, A142T, E149K, and R152H. In some embodiments, the modified IFN-β has one or more of the following mutations: R35A, R35T, E42K, M621, G78S, A141Y, A142T, E149K, and R152H in combination with C17S or C17A.

[0185] In some embodiments, the modified IFN-β has one or more of the following mutations: R35A, R35T, E42K, M621, G78S, A141Y, A142T, E149K, and R152H in combination with any of the other IFN-β mutations described herein.

[0186] The crystal structure of human IFN-β is known and is described in Karpusas et al., (1998) PNAS, 94(22): 11813-11818. Specifically, the structure of human IFN-β has been shown to include five α-helices (i.e., A, B, C, D, and E) and four loop regions that connect these helices (i.e., AB, BC, CD, and DE loops). In various embodiments, the modified IFN-β has one or more mutations in the A, B, C, D, E helices and/or the AB, BC, CD, and DE loops which reduce its binding affinity or activity at a therapeutic receptor such as IFNAR. Exemplary mutations are described in WO2000/023114 and US20150011732, the entire contents of which are hereby incorporated by reference. In an exemplary embodiment, the modified IFN-β is human IFN-β comprising alanine substitutions at amino acid positions 15, 16, 18, 19, 22, and/or 23. In an exemplary embodiment, the modified IFN-β is human IFN-β comprising alanine substitutions at amino acid positions 28-30, 32, and 33. In an exemplary embodiment, the modified IFN-β is human IFN-β comprising alanine substitutions at amino acid positions 36, 37, 39, and 42. In an exemplary embodiment, the modified IFN-β is human IFN-β comprising alanine substitutions at amino acid positions 64 and 67 and a serine substitution at position 68. In an exemplary embodiment, the modified IFN-β is human IFN-β comprising alanine substitutions at amino acid positions 71-73. In an exemplary embodiment, the modified IFN-β is human IFN-β comprising alanine substitutions at amino acid positions 92, 96, 99, and 100. In an exemplary embodiment, the modified IFN-β is human IFN-β comprising alanine substitutions at amino acid positions 128, 130, 131, and 134. In an exemplary embodiment, the modified IFN-β is human IFN-β comprising alanine substitutions at amino acid positions 149, 153, 156, and 159. In some embodiments, the mutant IFNβ comprises SEQ ID NO:3 and a mutation at W22, the mutation being an aliphatic hydrophobic residue selected from glycine (G), alanine (A), leucine (L), isoleucine (I), methionine (M), and valine (V).

[0187] In some embodiments, the mutant IFNβ comprises SEQ ID NO: 3 and a mutation at R27, the mutation being an aliphatic hydrophobic residue selected from glycine (G), alanine (A), leucine (L), isoleucine (I), methionine (M), and valine (V).

[0188] In some embodiments, the mutant IFNβ comprises SEQ ID NO: 3 and a mutation at W22, the mutation being an aliphatic hydrophobic residue selected from glycine (G), alanine (A), leucine (L), isoleucine (I), methionine (M), and valine (V) and a mutation at R27, the mutation being an aliphatic hydrophobic residue selected from glycine (G), alanine (A), leucine (L), isoleucine (I), methionine (M), and valine (V).

[0189] In some embodiments, the mutant IFNβ comprises SEQ ID NO: 3 and a mutation at L32, the mutation being an aliphatic hydrophobic residue selected from glycine (G), alanine (A), isoleucine (I), methionine (M), and valine (V).

[0190] In some embodiments, the mutant IFNβ comprises SEQ ID NO: 3 and a mutation at R35, the mutation being an aliphatic hydrophobic residue selected from glycine (G), alanine (A), leucine (L), isoleucine (I), methionine (M), and valine (V).

[0191] In some embodiments, the mutant IFNβ comprises SEQ ID NO: 3 and a mutation at L32, the mutation being an aliphatic hydrophobic residue selected from glycine (G), alanine (A), isoleucine (I), methionine (M), and valine (V) and a mutation at R35, the mutation being an aliphatic hydrophobic residue selected from glycine (G), alanine (A), leucine (L), isoleucine (I), methionine (M), and valine (V).

[0192] In some embodiments, the mutant IFNβ comprises SEQ ID NO: 3 and a mutation at F67, the mutation being an aliphatic hydrophobic residue selected from glycine (G), alanine (A), leucine (L), isoleucine (I), methionine (M), and valine (V).

[0193] In some embodiments, the mutant IFNβ comprises SEQ ID NO: 3 and a mutation at R71, the mutation being an aliphatic hydrophobic residue selected from glycine (G), alanine (A), leucine (L), isoleucine (I), methionine (M), and valine (V).

[0194] In some embodiments, the mutant IFNβ comprises SEQ ID NO: 3 and a mutation at F67, the mutation being an aliphatic hydrophobic residue selected from glycine (G), alanine (A), leucine (L), isoleucine (I), methionine (M), and valine (V) and a mutation at R71, the mutation being an aliphatic hydrophobic residue selected from glycine (G), alanine (A), leucine (L), isoleucine (I), methionine (M), and valine (V).

[0195] In some embodiments, the mutant IFNβ comprises SEQ ID NO: 3 and a mutation at L88, the mutation being an aliphatic hydrophobic residue selected from glycine (G), alanine (A), isoleucine (I), methionine (M), and valine (V).

[0196] In some embodiments, the mutant IFNβ comprises SEQ ID NO: 3 and a mutation at Y92, the mutation being an aliphatic hydrophobic residue selected from glycine (G), alanine (A), leucine (L), isoleucine (I), methionine (M), and valine (V).

[0197] In some embodiments, the mutant IFNβ comprises SEQ ID NO: 3 and a mutation at F67, the mutation being an aliphatic hydrophobic residue selected from glycine (G), alanine (A), leucine (L), isoleucine (I), methionine (M), and valine (V) and a mutation at L88, the mutation being an aliphatic hydrophobic residue selected from glycine (G), alanine (A), isoleucine (I), methionine (M), and valine (V) and a mutation at Y92, the mutation being an aliphatic hydrophobic residue selected from glycine (G), alanine (A), leucine (L), isoleucine (I), methionine (M), and valine (V).

[0198] In some embodiments, the mutant IFNβ comprises SEQ ID NO: 3 and a mutation at L88, the mutation being an aliphatic hydrophobic residue selected from glycine (G), alanine (A), isoleucine (I), methionine (M), and valine (V) and a mutation at Y92, the mutation being an aliphatic hydrophobic residue selected from glycine (G), alanine (A), leucine (L), isoleucine (I), methionine (M), and valine (V).

[0199] In some embodiments, the mutant IFNβ comprises SEQ ID NO: 3 and a mutation at I95, the mutation being an aliphatic hydrophobic residue selected from glycine (G), alanine (A), leucine (L), methionine (M), and valine (V) and a mutation at Y92, the mutation being an aliphatic hydrophobic residue selected from glycine (G), alanine (A), leucine (L), isoleucine (I), methionine (M), and valine (V).

[0200] In some embodiments, the mutant IFNβ comprises SEQ ID NO: 3 and a mutation at N96, the mutation being an aliphatic hydrophobic residue selected from glycine (G), alanine (A), leucine (L), isoleucine (I), methionine (M), and valine (V) and a mutation at Y92, the mutation being an aliphatic hydrophobic residue selected from glycine (G), alanine (A), leucine (L), isoleucine (I), methionine (M), and valine (V).

[0201] In some embodiments, the mutant IFNβ comprises SEQ ID NO: 3 and a mutation at Y92, the mutation being an aliphatic hydrophobic residue selected from glycine (G), alanine (A), leucine (L), isoleucine (I), methionine (M), and valine (V) and a mutation at I95, the mutation being an aliphatic hydrophobic residue selected from glycine (G), alanine (A), leucine (L), methionine (M), and valine (V) and a mutation at N96, the mutation being an aliphatic hydrophobic residue selected from glycine (G), alanine (A), leucine (L), isoleucine (I), methionine (M), and valine (V).

[0202] In some embodiments, the mutant IFNβ comprises SEQ ID NO: 3 and a mutation at K123, the mutation being an aliphatic hydrophobic residue selected from glycine (G), alanine (A), leucine (L), isoleucine (I), methionine (M), and valine (V).

[0203] In some embodiments, the mutant IFNβ comprises SEQ ID NO: 3 and a mutation at R124, the mutation being an aliphatic hydrophobic residue selected from glycine (G), alanine (A), leucine (L), isoleucine (I), methionine (M), and valine (V).

[0204] In some embodiments, the mutant IFNβ comprises SEQ ID NO: 3 and a mutation at K123, the mutation being an aliphatic hydrophobic residue selected from glycine (G), alanine (A), leucine (L), isoleucine (I), methionine (M), and valine (V) and a mutation at R124, the mutation being an aliphatic hydrophobic residue selected from glycine (G), alanine (A), leucine (L), isoleucine (I), methionine (M), and valine (V).

[0205] In some embodiments, the mutant IFNβ comprises SEQ ID NO: 3 and a mutation at L151, the mutation being an aliphatic hydrophobic residue selected from glycine (G), alanine (A), isoleucine (I), methionine (M), and valine (V).

[0206] In some embodiments, the mutant IFNβ comprises SEQ ID NO: 3 and a mutation at R152, the mutation being an aliphatic hydrophobic residue selected from glycine (G), alanine (A), leucine (L), isoleucine (I), methionine (M), and valine (V).

[0207] In some embodiments, the mutant IFNβ comprises SEQ ID NO: 3 and a mutation at L151, the mutation being an aliphatic hydrophobic residue selected from glycine (G), alanine (A), isoleucine (I), methionine (M), and valine (V) and a mutation at R152, the mutation being an aliphatic hydrophobic residue selected from glycine (G), alanine (A), leucine (L), isoleucine (I), methionine (M), and valine (V).

[0208] In some embodiments, the mutant IFNβ comprises SEQ ID NO: 3 and a mutation at V148, the mutation being an aliphatic hydrophobic residue selected from glycine (G), alanine (A), leucine (L), isoleucine (I), and methionine (M).

[0209] In some embodiments, the mutant IFNβ comprises SEQ ID NO: 3 and a mutation at V148, the mutation being an aliphatic hydrophobic residue selected from glycine (G), alanine (A), leucine (L), isoleucine (I), methionine (M), and valine (V) and a mutation at R152, the mutation being an aliphatic hydrophobic residue selected from glycine (G), alanine (A), leucine (L), isoleucine (I), methionine (M), and valine (V).

[0210] In some embodiments, the mutant IFNβ comprises SEQ ID NO: 3 and a mutation at Y155, the mutation being an aliphatic hydrophobic residue selected from glycine (G), alanine (A), leucine (L), isoleucine (I), methionine (M), and valine (V).

[0211] In some embodiments, the present invention relates to an Fc-based chimeric protein complex comprising: (a) a modified IFN-β, having the amino acid sequence of SEQ ID NO: 3 and a mutation at position W22, wherein the mutation is an aliphatic hydrophobic residue; and (b) one or more targeting moieties, said targeting moieties comprising recognition domains which specifically bind to antigens or receptors of interest, the modified IFN-β and the one or more targeting moieties are optionally connected with one or more linkers. In various embodiments the mutation at position W22 is aliphatic hydrophobic residue is selected from G, A, L, I, M, and V. In various embodiments, the mutation at position W22 is G.

[0212] Additional exemplary IFNβ mutants are provided in PCT/EP2017/061544, the entire disclosure of which is incorporated by reference herein.

[0213] In some embodiments, the signaling agent is a wild type or modified interferon γ. In such embodiments, the modified interferon γ agent has reduced affinity and/or activity for the interferon-gamma receptor (IFNGR), i.e., IFNGR1 and IFNGR2 chains. In some embodiments, the modified interferon γ agent has substantially reduced or ablated affinity and/or activity for the interferon-gamma receptor (IFNGR), i.e., IFNGR1 and/or IFNGR2 chains.

[0214] For example, the mutant IFN-γ can include a mutation, by way of non-limiting example, a truncation. In embodiments, the mutant IFN-γ has a truncation at the C-terminus, e.g. of about 5 to about 20 amino acid residues, or of about 16 amino acid residues, or of about 15 amino acid residues, or of about 14 amino acid residues, or of about 7 amino acid residues, or of about 5 amino acid residues. In embodiments, the mutant IFN-γ has one or more mutations at positions Q1, V5, E9, K12, H19, S20, V22, A23, D24, N25, G26, T27, L30, K108, H111, E112, I114, Q115, A118, E119, and K125. In embodiments, the mutant IFN-γ has one or more mutations are substitutions selected from V5E, S20E, V22A, A23G, A23F, D24G, G26Q, H111A, H111D, 1114A, Q115A, and A118G. In embodiments, the mutant IFN-γ comprises the V22A mutation. In embodiments, the mutant IFN-γ comprises the A23G mutation. In embodiments, the mutant IFN-γ comprises the D24G mutation. In embodiments, the mutant IFN-γ comprises the H111A mutation or the H111D mutation. In embodiments, the mutant IFN-γ comprises the 1114A mutation. In embodiments, the mutant IFN-γ comprises the Q115A mutation. In embodiments, the mutant IFN-γ comprises the A118G mutation. In embodiments, the mutant IFN-γ comprises the A23G mutation and the D24G mutation. In embodiments, the mutant IFN-γ comprises the 1114A mutation and the A118G mutation. IFN-γ is shown in SEQ ID NO: 1563 below and all mutations are relative to SEQ ID NO: 1563.

[0215] In some embodiments, the wild type or modified signaling agent is a consensus interferon. The consensus interferon is generated by scanning the sequences of several human non-allelic IFN-α subtypes and assigning the most frequently observed amino acid in each corresponding position. The consensus interferon differs from IFN-α2b at 20 out of 166 amino acids (88% homology), and comparison with IFN-β shows identity at over 30% of the amino acid positions. In various embodiments, the consensus interferon comprises the following amino acid sequence:

(SEQ ID NO: 4)
MCDLPQTHSLGNRRALILLAQMRRISPFSCLKDRHDFGFPQEEFDGNQFQ
KAQAISVLHEMIQQTFNLFSTKDSSAAWDESLLEKFYTELYQQLNDLEAC
VIQEVGVEETPLMNVDSILAVKKYFQRITLYLTEKKYSPCAWEWRAEIMR
SFSLSTNLQERLRRKE.

[0216] In some embodiments, the consensus interferon comprises the amino acid sequence of SEQ ID NO: 5, which differs from the amino acid sequence of SEQ ID NO: 4 by one amino acid, i.e., SEQ ID NO: 5 lacks the initial methionine residue of SEQ ID NO: 4:

(SEQ ID NO: 5)
CDLPQTHSLGNRRALILLAQMRRISPFSCLKDRHDFGFPQEEFDGNQFQK
AQAISVLHEMIQQTFNLFSTKDSSAAWDESLLEKFYTELYQQLNDLEACV
IQEVGVEETPLMNVDSILAVKKYFQRITLYLTEKKYSPCAWEVVRAEIMR
SFSLSTNLQERLRRKE.

[0217] In various embodiments, the consensus interferon comprises a wild type or modified version of the consensus interferon, i.e., a consensus interferon variant, as a signaling agent. In various embodiments, the consensus interferon variant encompasses functional derivatives, analogs, precursors, isoforms, splice variants, or fragments of the consensus interferon.

[0218] In an embodiment, the consensus interferon variants are selected form the consensus interferon variants disclosed in U.S. Pat. Nos. 4,695,623, 4,897,471, 5,541,293, and 8,496,921, the entire contents of all of which are hereby incorporated by reference. For example, the consensus interferon variant may comprise the amino acid sequence of IFN-CON₂ or IFN-CON₃ as disclosed in U.S. Pat. Nos. 4,695,623, 4,897,471, and 5,541,293. In an embodiment, the consensus interferon variant comprises the amino acid sequence of IFN-CON₂:

(SEQ ID NO: 6)
CDLPQTHSLGNRRTLMLLAQMRRISPFSCLKDRHDFGFPQEEFDGNQFQK
AQAISVLHEMIQQTFNLFSTKDSSAAWDESLLEKFYTELYQQLNDLEACV
IQEVGVEETPLMNVDSILAVKKYFQRITLYLTEKKYSPCAWEWRAEIMRS
FSLSTNLQERLRRKE.

[0219] In an embodiment, the consensus interferon variant comprises the amino acid sequence of IFN-CON₃:

(SEQ ID NO: 7)
CDLPQTHSLGNRRALILLAQMRRISPFSCLKDRHDFGFPQEEFDGNQFQK
AQAISVLHEMIQQTFNLFSTKDSSAAWDESLLEKFYTELYQQLNDLEACV
IQEVGVEETPLMNEDSILAVRKYFQRITLYLTEKKYSPCAWEVVRAEIMR
SFSLSTNLQERLRRKE.

[0220] In an embodiment, the consensus interferon variant comprises the amino acid sequence of any one of the variants disclosed in U.S. Pat. No. 8,496,921. For example, the consensus variant may comprise the amino acid sequence of:

(SEQ ID NO: 8)
MCDLPQTHSLGNRRALILLAQMRRISPFSCLKDRHDFGFPQEEFDGNQFQ
KAQAISVLHEMIQQTFNLFSTKDSSAAWDESLLEKFYTELYQQLNDLEAC
VIQEVGVEETPLMNEDSILAVRKYFQRITLYLTEKKYSPCAWEWRAEIMR
SFSLSTNLQERLRRKE.

[0221] In another embodiment, the consensus interferon variant may comprise the amino acid sequence of:

(SEQ ID NO: 9)
MCDLPQTHSLGNRRALILLAQMRRISPFSCLKDRHDFGFPQEEFDGNQFQ
KAQAISVLHEMIQQTFNLFSTKDSSAAWDESLLEKFYTELYQQLNDLEAC
VIQEVGVEETPLMNEDSILAVRKYFQRITLYLTEKKYSPCAWEVVRAEIM
RSFSLCTNLQERLRRKE.

[0222] In some embodiments, the consensus interferon variant may be PEGylated, i.e., comprises a PEG moiety. In an embodiment, the consensus interferon variant may comprise a PEG moiety attached at the S156C position of SEQ ID NO: 9.

[0223] In some embodiments, the engineered interferon is a variant of human IFN-α2a, with an insertion of Asp at approximately position 41 in the sequence Glu-Glu-Phe-Gly-Asn-Gln (SEQ ID NO: 10) to yield Glu-Glu-Phe-Asp-Gly-Asn-Gln (SEQ ID NO: 11) (which resulted in a renumbering of the sequence relative to IFN-α2a sequence) and the following mutations of Arg23Lys, Leu26Pro, Glu53Gln, Thr54Ala, Pro56Ser, Asp86Glu, Ile104Thr, Gly106Glu, Thr110Glu, Lys117Asn, Arg125Lys, and Lys136Thr. All embodiments herein that describe consensus interferons apply equally to this engineered interferon

[0224] In various embodiments, the consensus interferon variant comprises an amino acid sequence having one or more amino acid mutations. In some embodiments, the one or more amino acid mutations may be independently selected from substitutions, insertions, deletions, and truncations.

[0225] In some embodiments, the amino acid mutations are amino acid substitutions, and may include conservative and/or non-conservative substitutions.

[0226] In various embodiments, the substitutions may also include non-classical amino acids (e.g. selenocysteine, pyrrolysine, N-formylmethionine β-alanine, GABA and δ-Aminolevulinic acid, 4-aminobenzoic acid (PABA), D-isomers of the common amino acids, 2,4-diaminobutyric acid, α-amino isobutyric acid, 4-aminobutyric acid, Abu, 2-amino butyric acid, γ-Abu, ε-Ahx, 6-amino hexanoic acid, Aib, 2-amino isobutyric acid, 3-amino propionic acid, ornithine, norleucine, norvaline, hydroxyproline, sarcosme, citrulline, homocitrulline, cysteic acid, t-butylglycine, t-butylalanine, phenylglycine, cyclohexylalanine, β-alanine, fluoro-amino acids, designer amino acids such as β methyl amino acids, C α-methyl amino acids, N α-methyl amino acids, and amino acid analogs in general).

[0227] In various embodiments, the consensus interferon is modified to have one or more mutations. In some embodiments, the mutations allow for the consensus interferon variant to have one or more of attenuated activity such as one or more of reduced binding affinity, reduced endogenous activity, and reduced specific bioactivity relative to unmutated, e.g., the wild type form of the consensus interferon (e.g., the consensus interferon having an amino acid sequence of SEQ ID NO: 4 or 5). For instance, the one or more of attenuated activity such as reduced binding affinity, reduced endogenous activity, and reduced specific bioactivity relative to unmutated, e.g. the wild type form of the consensus interferon, may be at a therapeutic receptor such as IFNAR. Consequentially, in various embodiments, the mutations allow for the consensus interferon variant to have reduced systemic toxicity, reduced side effects, and reduced off-target effects relative to unmutated, e.g. the wild type form of the consensus interferon.

[0228] In various embodiments, the consensus interferon is modified to have a mutation that reduces its binding affinity or activity at a therapeutic receptor such as IFNAR. In some embodiments, the activity provided by the consensus interferon is agonism at the therapeutic receptor (e.g. activation of a cellular effect at a site of therapy). For example, the consensus interferon may activate the therapeutic receptor. In such embodiments, the mutation results in the consensus interferon variant to have reduced activating activity at the therapeutic receptor.

[0229] In some embodiments, the reduced affinity or activity at the therapeutic receptor is restorable by inclusion in the present complex having one or more of the targeting moieties as described herein. In other embodiments, the reduced affinity or activity at the therapeutic receptor is not substantially restorable by inclusion in the present complex having one or more of the targeting moieties as described herein. In various embodiments, the therapeutic Fc-based chimeric protein complexes of the present invention reduce off-target effects because the consensus interferon variant has mutations that weaken binding affinity or activity at a therapeutic receptor. In various embodiments, this reduces side effects observed with, for example, the wild type consensus interferon. In various embodiments, the consensus interferon variant is substantially inactive en route to the site of therapeutic activity and has its effect substantially on specifically targeted cell types which greatly reduces undesired side effects.

[0230] In various embodiments, the consensus interferon variant has one or more mutations that cause the consensus interferon variant to have attenuated or reduced affinity, e.g. binding (e.g. K_{D}) and/or activation (measurable as, for example, K_{A} and/or EC₅₀) for one or more therapeutic receptors. In various embodiments, the reduced affinity at the therapeutic receptor allows for attenuation of activity and/or signaling from the therapeutic receptor.

[0231] In various embodiments, the consensus interferon variant has one or more mutations that reduce its binding to or its affinity for the IFNAR1 subunit of IFNAR. In one embodiment, the consensus interferon variant has reduced affinity and/or activity at IFNAR1. In some embodiments, the consensus interferon variant has one or more mutations that reduce its binding to or its affinity for the IFNAR2 subunit of IFNAR. In some embodiments, the consensus interferon variant has one or more mutations that reduce its binding to or its affinity for both IFNAR1 and IFNAR2 subunits.

[0232] In some embodiments, the consensus interferon variant has one or more mutations that reduce its binding to or its affinity for IFNAR1 and one or more mutations that substantially reduce or ablate binding to or its affinity for IFNAR2. In some embodiments, Fc-based chimeric protein complexes with such consensus interferon variant can provide target-selective IFNAR1 activity (e.g. IFNAR1 activity is restorable via targeting through the targeting moiety, e.g., SIRPα).

[0233] In some embodiments, the consensus interferon variant has one or more mutations that reduce its binding to or its affinity for IFNAR2 and one or more mutations that substantially reduce or ablate binding to or its affinity for IFNAR1. In some embodiments, Fc-based chimeric protein complexes with such consensus interferon variant can provide target-selective IFNAR2 activity (e.g. IFNAR2 activity is restorable via targeting through the targeting moiety, e.g., SIRPα).

[0234] In some embodiments, the consensus interferon variant has one or more mutations that reduce its binding to or its affinity for IFNAR1 and one or more mutations that reduce its binding to or its affinity for IFNAR2. In some embodiments, Fc-based chimeric protein complexes with such consensus interferon variant can provide target-selective IFNAR1 and/or IFNAR2 activity (e.g. IFNAR1 and/IFNAR2 activity is restorable via targeting through the targeting moiety, e.g., SIRPα).

[0235] In some embodiments, the consensus interferon is modified to have a mutation at one or more amino acids at positions 145-155, such as amino acid positions 149, 150 and/or 154, with reference to SEQ ID NO:5. In some embodiments, the consensus interferon is modified to have a mutation at one or more amino acids at positions 145-155, such as amino acid positions 149, 150 and/or 154, with reference to SEQ ID NO: 5, the substitutions optionally being hydrophobic and selected from alanine, valine, leucine, and isoleucine. In some embodiments, the consensus interferon mutant comprises one or more mutations selected from M149A, R150A, and L154A, and, with reference to SEQ ID NO: 5.

[0236] In an embodiment, the consensus interferon is modified to have a mutation at amino acid position 121 (i.e., K121), with reference to SEQ ID NO: 5. In an embodiment, the consensus interferon comprises a K121E mutation, with reference to SEQ ID NO: 5.

[0237] In various embodiments, the wild type or modified signaling agent is selected from a wild type or modified versions of cytokines, growth factors, and hormones. Illustrative examples of such cytokines, growth factors, and hormones include, but are not limited to, lymphokines, monokines, traditional polypeptide hormones, such as human growth hormone, N-methionyl human growth hormone, and bovine growth hormone; parathyroid hormone; thyroxine; insulin; proinsulin; relaxin; prorelaxin; glycoprotein hormones such as follicle stimulating hormone (FSH), thyroid stimulating hormone (TSH), and luteinizing hormone (LH); hepatic growth factor; fibroblast growth factor; prolactin; placental lactogen; tumor necrosis factor-α and tumor necrosis factor-β; mullerian-inhibiting substance; mouse gonadotropin-associated peptide; inhibin; activin; vascular endothelial growth factor; integrin; thrombopoietin (TPO); nerve growth factors such as NGF-α; platelet-growth factor; transforming growth factors (TGFs) such as TGF-α and TGF-β; insulin-like growth factor-I and -II; osteo inductive factors; interferons such as, for example, interferon-α, interferon-β and interferon-γ (and interferon type I, II, and III), colony stimulating factors (CSFs) such as macrophage-CSF (M-CSF); granulocyte-macrophage-CSF (GM-CSF); and granulocyte-CSF (G-CSF); interleukins (ILs) such as, for example, IL-1β, IL-1α, IL-2, IL-3, IL-4, IL-5, IL-6, IL-7, IL-8, IL-9, IL-10, IL-11, IL-12, IL-13, IL-15, and IL-18; a tumor necrosis factor such as, for example, TNF-α or TNF-β; and other polypeptide factors including, for example, LIF and kit ligand (KL). As used herein, cytokines, growth factors, and hormones include proteins obtained from natural sources or produced from recombinant bacterial, eukaryotic or mammalian cell culture systems and biologically active equivalents of the native sequence cytokines.

[0238] In some embodiments, the signaling agent is a wild type or modified version of a growth factor selected from, but not limited to, transforming growth factors (TGFs) such as TGF-α and TGF-β (and subtypes thereof including the various subtypes of TGF-β including TGFβ1, TGFβ2, and TGFβ3), epidermal growth factor (EGF), insulin-like growth factor such as insulin-like growth factor-I and -II, fibroblast growth factor (FGF), heregulin, platelet-derived growth factor (PDGF), vascular endothelial growth factor (VEGF).

[0239] In an embodiment, the growth factor is a modified version of a fibroblast growth factor (FGF). Illustrative FGFs include, but are not limited to, FGF1, FGF2, FGF3, FGF4, FGF5, FGF6, FGF7, FGF8, FGF9, FGF10, FGF11, FGF12, FGF13, FGF14, murine FGF15, FGF16, FGF17, FGF18, FGF19, FGF20, FGF21, FGF22, and FGF23.

[0240] In some embodiments, the wild type or modified signaling agent is vascular endothelial growth factor (VEGF). VEGF is a potent growth factor that plays major roles in physiological but also pathological angiogenesis, regulates vascular permeability and can act as a growth factor on cells expressing VEGF receptors. Additional functions include, among others, stimulation of cell migration in macrophage lineage and endothelial cells. Several members of the VEGF family of growth factors exist, as well as at least three receptors (VEGFR-1, VEGFR-2, and VEGFR-3). Members of the VEGF family can bind and activate more than one VEGFR type. For example, VEGF-A binds VEGFR-1 and -2, while VEGF-C can bind VEGFR-2 and -3. VEGFR-1 and -2 activation regulates angiogenesis while VEGFR-3 activation is associated with lymphangiogenesis. The major pro-angiogenic signal is generated from activation of VEGFR-2. VEGFR-1 activation has been reported to be possibly associated with negative role in angiogenesis. It has also been reported that VEGFR-1 signaling is important for progression of tumors in vivo via bone marrow-derived VEGFR-1 positive cells (contributing to formation of premetastatic niche in the bone). Several therapies based on VEGF-A directed/neutralizing therapeutic antibodies have been developed, primarily for use in treatment of various human tumors relying on angiogenesis. These are not without side effects though. This may not be surprising considering that these operate as general, non-cell/tissue specific VEGF/VEGFR interaction inhibitors. Hence, it would be desirable to restrict VEGF (e.g. VEGF-A)/VEGFR-2 inhibition to specific target cells (e.g. tumor vasculature endothelial cells).

[0241] In some embodiments, the VEGF is VEGF-A, VEGF-B, VEGF-C, VEGF-D, or VEGF-E and isoforms thereof including the various isoforms of VEGF-A such as VEGF₁₂₁, VEGF₁₂₁b, VEGF₁₄₅, VEGF₁₆₅, VEGF₁₆₅b, VEGF₁₈₉, and VEGF₂₀₆. In some embodiments, the modified signaling agent has reduced affinity and/or activity for VEGFR-1 (Flt-1) and/or VEGFR-2 (KDR/Flk-1). In some embodiments, the modified signaling agent has substantially reduced or ablated affinity and/or activity for VEGFR-1 (Flt-1) and/or VEGFR-2 (KDR/Flk-1). In an embodiment, the modified signaling agent has reduced affinity and/or activity for VEGFR-2 (KDR/Flk-1) and/or substantially reduced or ablated affinity and/or activity for VEGFR-1 (Flt-1). Such an embodiment finds use, for example, in wound healing methods or treatment of ischemia-related diseases (without wishing to be bound by theory, mediated by VEGFR-2's effects on endothelial cell function and angiogenesis). In various embodiments, binding to VEGFR-1 (Flt-1), which is linked to cancers and pro-inflammatory activities, is avoided. In various embodiments, VEGFR-1 (Flt-1) acts a decoy receptor and therefore substantially reduces or ablates affinity at this receptor avoids sequestration of the therapeutic agent. In an embodiment, the modified signaling agent has substantially reduced or ablated affinity and/or activity for VEGFR-1 (Flt-1) and/or substantially reduced or ablated affinity and/or activity for VEGFR-2 (KDR/Flk-1). In some embodiments, the VEGF is VEGF-C or VEGF-D. In such embodiments, the modified signaling agent has reduced affinity and/or activity for VEGFR-3. Alternatively, the modified signaling agent has substantially reduced or ablated affinity and/or activity for VEGFR-3.

[0242] Proangiogenic therapies are also important in various diseases (e.g. ischemic heart disease, bleeding etc.), and include VEGF-based therapeutics. Activation of VEGFR-2 is proangiogenic (acting on endothelial cells). Activation of VEFGR-1 can cause stimulation of migration of inflammatory cells (including, for example, macrophages) and lead to inflammation associated hypervascular permeability. Activation of VEFGR-1 can also promote bone marrow associated tumor niche formation. Thus, VEGF based therapeutic selective for VEGFR-2 activation would be desirable in this case. In addition, cell specific targeting, e.g. to endothelial cells, would be desirable.

[0243] In some embodiments, the modified signaling agent has reduced affinity and/or activity (e.g. antagonistic) for VEGFR-2 and/or has substantially reduced or ablated affinity and/or activity for VEGFR-1. When targeted to tumor vasculature endothelial cells via a targeting moiety that binds to a tumor endothelial cell marker (e.g. PSMA and others), such construct inhibits VEGFR-2 activation specifically on such marker-positive cells, while not activating VEGFR-1 en route and on target cells (if activity ablated), thus eliminating induction of inflammatory responses, for example. This would provide a more selective and safe anti-angiogenic therapy for many tumor types as compared to VEGF-A neutralizing therapies.

[0244] In some embodiments, the modified signaling agent has reduced affinity and/or activity (e.g. agonistic) for VEGFR-2 and/or has substantially reduced or ablated affinity and/or activity for VEGFR-1. Through targeting to vascular endothelial cells, such construct, in some embodiments, promotes angiogenesis without causing VEGFR-1 associated induction of inflammatory responses. Hence, such a construct would have targeted proangiogenic effects with substantially reduced risk of side effects caused by systemic activation of VEGFR-2 as well as VEGR-1.

[0245] In an illustrative embodiment, the modified signaling agent is a modified VEGF₁₆₅, the wild type amino acid sequence of VEGF₁₆₅ is:

(SEQ ID NO: 12)
APMAEGGGQNHHEVVKFMDVYQRSYCHPIETLVDIFQEYPDEIEYIFKPS
CVPLMRCGGCCNDEGLECVPTEESNITMQIMRIKPHQGQHIGEMSFLQHN
KCECRPKKDRARQENPCGPCSERRKHLFVQDPQTCKCSCKNTDSRCKARQ
LELNERTCRCDKPRR.

[0246] In another illustrative embodiment, the modified signaling agent is a modified VEGF₁₆₅b, the wild type amino acid sequence of VEGF₁₆₅b is:

(SEQ ID NO: 13)
APMAEGGGQNHHEVVKFMDVYQRSYCHPIETLVDIFQEYPDEIEYIFKPS
CVPLMRCGGCCNDEGLECVPTEESNITMQIMRIKPHQGQHIGEMSFLQHN
KCECRPKKDRARQENPCGPCSERRKHLFVQDPQTCKCSCKNTDSRCKARQ
LELNERTCRSLTRKD.

[0247] In these embodiments, the modified signaling agent has a mutation at amino acid 183 (e.g., a substitution mutation at I83, e.g., I83K, I83R, or I83H). Without wishing to be bound by theory, it is believed that such mutations may result in reduced receptor binding affinity. See, for example, U.S. Pat. No. 9,078,860, the entire contents of which are hereby incorporated by reference.

[0248] In some embodiments, the signaling agent is a wild type or modified version of a hormone selected from, but not limited to, human chorionic gonadotropin, gonadotropin releasing hormone, an androgen, an estrogen, thyroid-stimulating hormone, follicle-stimulating hormone, luteinizing hormone, prolactin, growth hormone, adrenocorticotropic hormone, antidiuretic hormone, oxytocin, thyrotropin-releasing hormone, growth hormone releasing hormone, corticotropin-releasing hormone, somatostatin, dopamine, melatonin, thyroxine, calcitonin, parathyroid hormone, glucocorticoids, mineralocorticoids, adrenaline, noradrenaline, progesterone, insulin, glucagon, amylin, calcitriol, calciferol, atrial-natriuretic peptide, gastrin, secretin, cholecystokinin, neuropeptide Y, ghrelin, PYY3-36, insulin-like growth factor (IGF), leptin, thrombopoietin, erythropoietin (EPO), and angiotensinogen.

[0249] In some embodiments, the wild type or modified signaling agent is TNF-α. TNF is a pleiotropic cytokine with many diverse functions, including regulation of cell growth, differentiation, apoptosis, tumorigenesis, viral replication, autoimmunity, immune cell functions and trafficking, inflammation, and septic shock. It binds to two distinct membrane receptors on target cells: TNFR1 (p55) and TNFR2 (p75). TNFR1 exhibits a very broad expression pattern whereas TNFR2 is expressed preferentially on certain populations of lymphocytes, Tregs, endothelial cells, certain neurons, microglia, cardiac myocytes and mesenchymal stem cells. Very distinct biological pathways are activated in response to receptor activation, although there is also some overlap. As a general rule, without wishing to be bound by theory, TNFR1 signaling is associated with induction of apoptosis (cell death) and TNFR2 signaling is associated with activation of cell survival signals (e.g. activation of NFkB pathway). Administration of TNF is systemically toxic, and this is largely due to TNFR1 engagement. However, it should be noted that activation of TNFR2 is also associated with a broad range of activities and, as with TNFR1, in the context of developing TNF based therapeutics, control over TNF targeting and activity is important.

[0250] In some embodiments, the modified signaling agent has reduced affinity and/or activity for TNFR1 and/or TNFR2. In some embodiments, the modified signaling agent has substantially reduced or ablated affinity and/or activity for TNFR1 and/or TNFR2. TNFR1 is expressed in most tissues, and is involved in cell death signaling while, by contrast, TNFR2 is involved in cell survival signaling. Accordingly, in embodiments directed to methods of treating cancer, the modified signaling agent has reduced affinity and/or activity for TNFR1 and/or substantially reduced or ablated affinity and/or activity for TNFR2. In these embodiments, the Fc-based chimeric protein complexes may be targeted to a cell for which apoptosis is desired, e.g. a tumor cell or a tumor vasculature endothelial cell. In embodiments directed to methods of promoting cell survival, for example, in neurogenesis for the treatment of neurodegenerative disorders, the modified signaling agent has reduced affinity and/or activity for TNFR2 and/or substantially reduced or ablated affinity and/or activity for TNFR1. Stated another way, the present Fc-based chimeric protein complexes, in some embodiments, comprise modified TNF-α agent that allows of favoring either death or survival signals.

[0251] In some embodiments, the Fc-based chimeric protein complex has a modified TNF having reduced affinity and/or activity for TNFR1 and/or substantially reduced or ablated affinity and/or activity for TNFR2. Such an Fc-based chimeric protein complex, in some embodiments, is a more potent inducer of apoptosis as compared to a wild type TNF and/or an Fc-based chimeric protein complex bearing only mutation(s) causing reduced affinity and/or activity for TNFR1. Such an Fc-based chimeric protein complex, in some embodiments, finds use in inducing tumor cell death or a tumor vasculature endothelial cell death (e.g. in the treatment of cancers). Also, in some embodiments, these Fc-based chimeric protein complexes avoid or reduce activation of T_{reg} cells via TNFR2, for example, thus further supporting TNFR1-mediated antitumor activity in vivo.

[0252] In some embodiments, the Fc-based chimeric protein complex has a modified TNF having reduced affinity and/or activity for TNFR2 and/or substantially reduced or ablated affinity and/or activity for TNFR1. Such an Fc-based chimeric protein complex, in some embodiments, is a more potent activator of cell survival in some cell types, which may be a specific therapeutic objective in various disease settings, including without limitation, stimulation of neurogenesis. In addition, such a TNFR2-favoring Fc-based chimeric protein complexes also are useful in the treatment of autoimmune diseases (e.g. Crohn's, diabetes, MS, colitis etc. and many others described herein). In some embodiments, the Fc-based chimeric protein complex is targeted to auto-reactive T cells. In some embodiments, the Fc-based chimeric protein complex promotes T_{reg} cell activation and indirect suppression of cytotoxic T cells.

[0253] In some embodiments, the Fc-based chimeric protein complex causes the death of auto-reactive T cells, e.g. by activation of TNFR2 and/or avoidance TNFR1 (e.g. a modified TNF having reduced affinity and/or activity for TNFR2 and/or substantially reduced or ablated affinity and/or activity for TNFR1). Without wishing to be bound by theory these auto-reactive T cells, have their apoptosis/survival signals altered e.g. by NFkB pathway activity/signaling alterations. In some embodiments, the Fc-based chimeric protein complex causes the death of autoreactive T cells having lesions or modifications in the NFκB pathway, which underlie an imbalance of their cell death (apoptosis)/survival signaling properties and, optionally, altered susceptibility to certain death-inducing signals (e.g., TNFR2 activation).

[0254] In some embodiments, a TNFR-2 based Fc-based chimeric protein complex has additional therapeutic applications in diseases, including autoimmune disease, various heart disease, de-myelinating and neurodegenerative disorders, and infectious disease, among others.

[0255] In an embodiment, the wild type TNF-α has the amino acid sequence of:

(SEQ ID NO: 14)
VRSSSRTPSDKPVAHVVANPQAEGQLQWLNRRANALLANGVELRDNQLVV
PSEGLYLIYSQVLFKGQGCPSTHVLLTHTISRIAVSYQTKVNLLSAIKSP
CQRETPEGAEAKPWYEPIYLGGVFQLEKGDRLSAEINRPDYLDFAESGQV
YFGIIAL.

[0256] In such embodiments, the modified TNF-α agent has mutations at one or more amino acid positions 29, 31, 32, 84, 85, 86, 87, 88, 89, 145, 146 and 147 which produces a modified TNF-α with reduced receptor binding affinity. See, for example, U.S. Pat. No. 7,993,636, the entire contents of which are hereby incorporated by reference.

[0257] In some embodiments, the modified human TNF-α moiety has mutations at one or more amino acid positions R32, N34, Q67, H73, L75, T77, S86, Y87, V91, 197, T105, P106, A109, P113, Y115, E127, N137, D143, A145, and E146 as described, for example, in WO/2015/007903, the entire contents of which is hereby incorporated by reference (numbering according to the human TNF sequence, Genbank accession number BAG70306, version BAG70306.1 GI: 197692685). In some embodiments, the modified human TNF-α moiety has substitution mutations selected from L29S, R32G, R32W, N34G, Q67G, H73G, L75G, L75A, L75S, T77A, S86G, S86T, Y87Q, Y87L, Y87A, Y87F, Y87H, V91G, V91A, 197A, 197Q, 197S, T105G, P106G, A109Y, P113G, Y115G, Y115A, E127G, N137G, D143N, A145G, A145R, A145T, E146D, E146K, and S147D. In some embodiments, the human TNF-α moiety has a mutation selected from Y87Q, Y87L, Y87A, Y87F, and Y87H. In another embodiment, the human TNF-α moiety has a mutation selected from 197A, 197Q, and 197S. In a further embodiment, the human TNF-α moiety has a mutation selected from Y115A and Y115G. In some embodiments, the human TNF-α moiety has an E146K mutation. In some embodiments, the human TNF-α moiety has an Y87H and an E146K mutation. In some embodiments, the human TNF-α moiety has an Y87H and an A145R mutation. In some embodiments, the human TNF-α moiety has a R32W and a S86T mutation. In some embodiments, the human TNF-α moiety has a R32W and an E146K mutation. In some embodiments, the human TNF-α moiety has a L29S and a R32W mutation. In some embodiments, the human TNF-α moiety has a D143N and an A145R mutation. In some embodiments, the human TNF-α moiety has a D143N and an A145R mutation. In some embodiments, the human TNF-α moiety has an A145T, an E146D, and a S147D mutation. In some embodiments, the human TNF-α moiety has an A145T and a S147D mutation.

[0258] In some embodiments, the modified TNF-α agent has one or more mutations selected from N39Y, S147Y, and Y87H, as described in WO2008/124086, the entire contents of which is hereby incorporated by reference.

[0259] In some embodiments, the modified human TNF-α moiety has mutations that provide receptor selectivity as described in PCT/IB2016/001668, the entire contents of which are hereby incorporated by reference. In some embodiments, the mutations to TNF are TNF-R1 selective. In some embodiments, the mutations to TNF which are TNF-R1 selective are at one or more of positions R32, S86, and E146. In some embodiments, the mutations to TNF which are TNF-R1 selective are one or more of R32W, S86T, and E146K. In some embodiments, the mutations to TNF which are TNF-R1 selective are one or more of R32W, R32W/S86T, R32W/E146K and E146K.

[0260] In some embodiments, the mutations to TNF are TNF-R2 selective. In some embodiments, the mutations to TNF which are TNF-R2 selective are at one or more of positions A145, E146, and S147. In some embodiments, the mutations to TNF which are TNF-R2 selective are one or more of A145T, A145R, E146D, and S147D. In some embodiments, the mutations to TNF which are TNF-R2 selective are one or more of A145R, A145T/S147D, and A145T/E146D/S147D.

[0261] In an embodiment, the wild type or modified signaling agent is TNF-6. TNF-6 can form a homotrimer or a heterotrimer with LT-β (LT-α1β2). In some embodiments, the modified signaling agent has substantially reduced or ablated affinity and/or activity for TNFR1 and/or TNFR2 and/or herpes virus entry mediator (HEVM) and/or LT-6R.

[0262] In an embodiment, the wild type TNF-β has the amino acid sequence of:

(SEQ ID NO: 15)
LPGVGLTPSAAQTARQHPKMHLAHSNLKPAAHLIGDPSKQNSLLWRANTD
RAFLQDGFSLSNNSLLVPTSGIYFVYSQWFSGKAYSPKATSSPLYLAHEV
QLFSSQYPFHVPLLSSQKMVYPGLQEPWLHSMYHGAAFQLTQGDQLSTHT
DGIPHLVLSPSTVFFGAFAL.

[0263] In such embodiments, the modified TNF-β agent may comprise mutations at one or more amino acids at positions 106-113, which produce a modified TNF-β with reduced receptor binding affinity to TNFR2. In an embodiment, the modified signaling agent has one or more substitution mutations at amino acid positions 106-113. In illustrative embodiments, the substitution mutations are selected from Q107E, Q107D, S106E, S106D, Q107R, Q107N, Q107E/S106E, Q107E/S106D, Q107D/S106E, and Q107D/S106D. In another embodiment, the modified signaling agent has an insertion of about 1 to about 3 amino acids at positions 106-113.

[0264] In some embodiments, the wild type or modified agent is a TNF family member (e.g. TNF-alpha, TNF-beta) which can be a single chain trimeric version as described in WO 2015/007903 and PCT/IB2016/001668, the entire contents of which are incorporated by reference.

[0265] In some embodiments, the modified agent is a TNF family member (e.g. TNF-alpha, TNF-beta) which has reduced affinity and/or activity, i.e. antagonistic activity (e.g. natural antagonistic activity or antagonistic activity that is the result of one or more mutations, see, e.g., WO 2015/007520, the entire contents of which are hereby incorporated by reference) at TNFR1. In these embodiments, the modified agent is a TNF family member (e.g. TNF-alpha, TNF-beta) which also, optionally, has substantially reduced or ablated affinity and/or activity for TNFR2. In some embodiments, the modified agent is a TNF family member (e.g. TNF-alpha, TNF-beta) which has reduced affinity and/or activity, i.e. antagonistic activity (e.g. natural antagonistic activity or antagonistic activity that is the result of one or more mutations, see, e.g., WO 2015/007520, the entire contents of which are hereby incorporated by reference) at TNFR2. In these embodiments, the modified agent is a TNF family member (e.g. TNF-alpha, TNF-beta) which also, optionally, has substantially reduced or ablated affinity and/or activity for TNFR1. The constructs of such embodiments find use in, for example, methods of dampening TNF response in a cell specific manner. In some embodiments, the antagonistic TNF family member (e.g. TNF-alpha, TNF-beta) is a single chain trimeric version as described in WO 2015/007903.

[0266] In an embodiment, the wild type or modified signaling agent is TRAIL. In some embodiments, the modified TRAIL agent has reduced affinity and/or activity for DR4 (TRAIL-RI) and/or DR5 (TRAIL-RII) and/or DcR1 and/or DcR2.

[0267] In some embodiments, the modified TRAIL agent has substantially reduced or ablated affinity and/or activity for DR4 (TRAIL-RI) and/or DR5 (TRAIL-RII) and/or DcR1 and/or DcR2.

[0268] In an embodiment, the wild type TRAIL has the amino acid sequence of:

(SEQ ID NO: 16)
[sequence omitted]

[0269] In such embodiments, the modified TRAIL agent may comprise a mutation at amino acid positions T127-R132, E144-R149, E155-H161, Y189-Y209, T214-1220, K224-A226, W231, E236-L239, E249-K251, T261-H264 and H270-E271 (Numbering based on the human sequence, Genbank accession number NP_003801, version 10 NP_003801.1, GI: 4507593; see above).

[0270] such embodiments, the modified TRAIL agent may comprise a truncation, e.g., without limitation, as described in, for example, Trebing et al., (2014) Cell Death and Disease, 5:e1035, the entire disclosure of which is hereby incorporated by reference

[0271] In some embodiments, the modified TRAIL agent may comprise one or more mutations that substantially reduce its affinity and/or activity for TRAIL-R1. In such embodiments, the modified TRAIL agent may specifically bind to TRIL-R2. Exemplary mutations include mutations at one or more amino acid positions Y189, R191, Q193, H264, 1266, and D267. For example, the mutations may be one or more of Y189Q, R191K, Q193R, H264R, 1266L and D267Q.

[0272] In an embodiment, the modified TRAIL agent comprises the mutations Y189Q, R191K, Q193R, H264R, I266L and D267Q.

[0273] In some embodiments, the modified TRAIL agent may comprise one or more mutations that substantially reduce its affinity and/or activity for TRAIL-R2. In such embodiments, the modified TRAIL agent may specifically bind to TRIL-R1. Exemplary mutations include mutations at one or more amino acid positions G131, R149, S159, N199, K201, and S215. For example, the mutations may be one or more of G131R, R1491, S159R, N199R, K201H, and S215D. In an embodiment, the modified TRAIL agent comprises the mutations G131R, R1491, S159R, N199R, K201H, and S215D. Additional TRAIL mutations are described in, for example, Trebing et al., (2014) Cell Death and Disease, 5:e1035, the entire disclosure of which is hereby incorporated by reference.

[0274] In an embodiment, the wild type or modified signaling agent is TGFα. In such embodiments, the modified TGFα agent has reduced affinity and/or activity for the epidermal growth factor receptor (EGFR). In some embodiments, the modified TGFα agent has substantially reduced or ablated affinity and/or activity for the epidermal growth factor receptor (EGFR).

[0275] In an embodiment, the wild type or modified signaling agent is TGFβ. In such embodiments, the modified signaling agent has reduced affinity and/or activity for TGFBR1 and/or TGFBR2. In some embodiments, the modified signaling agent has substantially reduced or ablated affinity and/or activity for TGFBR1 and/or TGFBR2. In some embodiments, the modified signaling agent optionally has reduced or substantially reduced or ablated affinity and/or activity for TGFBR3 which, without wishing to be bound by theory, may act as a reservoir of ligand for TGF-beta receptors. In some embodiments, the TGFβ may favor TGFBR1 over TGFBR2 or TGFBR2 over TGFBR1. Similarly, LAP, without wishing to be bound by theory, may act as a reservoir of ligand for TGF-beta receptors. In some embodiments, the modified signaling agent has reduced affinity and/or activity for TGFBR1 and/or TGFBR2 and/or substantially reduced or ablated affinity and/or activity for Latency Associated Peptide (LAP). In some embodiments, such Fc-based chimeric protein complexes find use in Camurati-Engelmann disease, or other diseases associated with inappropriate TGβ signaling.

[0276] In some embodiments, the wild type or modified agent is a TGF family member (e.g. TGFα, TGβ) which has reduced affinity and/or activity, i.e. antagonistic activity (e.g. natural antagonistic activity or antagonistic activity that is the result of one or more mutations, see, e.g., WO 2015/007520, the entire contents of which are hereby incorporated by reference) at one or more of TGFBR1, TGFBR2, TGFBR3. In these embodiments, the modified agent is a TGF family member (e.g. TGFα, TGβ) which also, optionally, has substantially reduced or ablated affinity and/or activity at one or more of TGFBR1, TGFBR2, and TGFBR3.

[0277] In some embodiments, the modified agent is a TGF family member (e.g. TGFα, TGβ) which has reduced affinity and/or activity, i.e. antagonistic activity (e.g. natural antagonistic activity or antagonistic activity that is the result of one or more mutations, see, e.g., WO 2015/007520, the entire contents of which are hereby incorporated by reference) at TGFBR1 and/or TGFBR2. In these embodiments, the modified agent is a TGF family member (e.g. TGFα, TGβ) which also, optionally, has substantially reduced or ablated affinity and/or activity at TGFBR3.

[0278] In an embodiment, the wild type or modified signaling agent is an interleukin. In an embodiment, the modified signaling agent is IL-1. In an embodiment, the modified signaling agent is IL-1α or IL-1β. In some embodiments, the modified signaling agent has reduced affinity and/or activity for IL-1R1 and/or IL-1RAcP. In some embodiments, the modified signaling agent has substantially reduced or ablated affinity and/or activity for IL-1R1 and/or IL-1RAcP. In some embodiments, the modified signaling agent has reduced affinity and/or activity for IL-1R2. In some embodiments, the modified signaling agent has substantially reduced or ablated affinity and/or activity for IL-1R2.

[0279] For instance, in some embodiments, the present modified IL-1 agents avoid interaction at IL-1R2 and therefore substantially reduce its function as a decoy and/or sink for therapeutic agents.

[0280] In an embodiment, the wild type IL-1β has the amino acid sequence of:

(SEQ ID NO: 17)
APVRSLNCTLRDSQQKSLVMSGPYELKALHLQGQDMEQQVVFSMSFVQGE
ESNDKIPVALGLKEKNLYLSCVLKDDKPTLQLESVDPKNYPKKKMEKRFV
FNKIElNNKLEFESAQFPNWYISTSQAENMPVFLGGTKGGQDITDFTMQF
VSS.

[0281] IL-1β is a proinflammatory cytokine and an important immune system regulator. It is a potent activator of CD4 T cell responses, increases proportion of Th17 cells and expansion of IFNγ and IL-4 producing cells. IL-1β is also a potent regulator of CD8⁺ T cells, enhancing antigen-specific CD8⁺ T cell expansion, differentiation, migration to periphery and memory. IL-1β receptors comprise IL-1R1 and IL-1R2. Binding to and signaling through the IL-1R1 constitutes the mechanism whereby IL-1β mediates many of its biological (and pathological) activities. IL1-R2 can function as a decoy receptor, thereby reducing IL-1β availability for interaction and signaling through the IL-1R1.

[0282] In some embodiments, the modified IL-1β has reduced affinity and/or activity (e.g. agonistic activity) for IL-1R1. In some embodiments, the modified IL-1β has substantially reduced or ablated affinity and/or activity for IL-1R2. In such embodiments, there is restorable IL-1β/IL-1R1 signaling and prevention of loss of therapeutic Fc-based chimeric protein complexes at IL-R2 and therefore a reduction in dose of IL-1β that is required (e.g. relative to wild type or an Fc-based chimeric protein complex bearing only an attenuation mutation for IL-R1). Such constructs find use in, for example, methods of treating cancer, including, for example, stimulating the immune system to mount an anti-cancer response.

[0283] In some embodiments, the modified IL-1β has reduced affinity and/or activity (e.g. antagonistic activity, e.g. natural antagonistic activity or antagonistic activity that is the result of one or more mutations, see, e.g., WO 2015/007520, the entire contents of which are hereby incorporated by reference) for IL-1R1. In some embodiments, the modified IL-1β has substantially reduced or ablated affinity and/or activity for IL-1R2. In such embodiments, there is the IL-1β/IL-1R1 signaling is not restorable and prevention of loss of therapeutic Fc-based chimeric protein complexes at IL-R2 and therefore a reduction in dose of IL-1β that is required (e.g. relative to wild type or an Fc-based chimeric protein complex bearing only an attenuation mutation for IL-R1). Such constructs find use in, for example, methods of treating autoimmune diseases, including, for example, suppressing the immune system.

[0284] In such embodiments, the modified signaling agent has a deletion of amino acids 52-54 which produces a modified human IL-1β with reduced binding affinity for type I IL-1R and reduced biological activity. See, for example, WO 1994/000491, the entire contents of which are hereby incorporated by reference. In some embodiments, the modified human IL-1β has one or more substitution mutations selected from A117G/P118G, R120X, L122A, T125G/L126G, R127G, Q130X, Q131G, K132A, S137G/Q138Y, L145G, H146X, L145A/L147A, Q148X, Q148G/Q150G, Q150G/D151A, M152G, F162A, F162A/Q164E, F166A, Q164E/E167K, N169G/D170G, I172A, V174A, K208E, K209X, K209A/K210A, K219X, E221X, E221 S/N224A, N224S/K225S, E244K, N245Q (where X can be any change in amino acid, e.g., a non-conservative change), which exhibit reduced binding to IL-1R, as described, for example, in WO2015/007542 and WO/2015/007536, the entire contents of which is hereby incorporated by reference (numbering base on the human IL-1 β sequence, Genbank accession number NP_000567, version NP-000567.1, GI: 10835145). In some embodiments, the modified human IL-1β may have one or more mutations selected from R120A, R120G, Q130A, Q130W, H146A, H146G, H146E, H146N, H146R, Q148E, Q148G, Q148L, K209A, K209D, K219S, K219Q, E221S and E221K. In an embodiment, the modified human IL-1β comprises the mutations Q131G and Q148G. In an embodiment, the modified human IL-1β comprises the mutations Q148G and K208E. In an embodiment, the modified human IL-1β comprises the mutations R120G and Q131G. In an embodiment, the modified human IL-1β comprises the mutations R120G and H146A. In an embodiment, the modified human IL-1β comprises the mutations R120G and H146N. In an embodiment, the modified human IL-1β comprises the mutations R120G and H146R. In an embodiment, the modified human IL-1β comprises the mutations R120G and H146E. In an embodiment, the modified human IL-1β comprises the mutations R120G and H146G. In an embodiment, the modified human IL-1β comprises the mutations R120G and K208E. In an embodiment, the modified human IL-1β comprises the mutations R120G, F162A, and Q164E.

[0285] In an embodiment, the wild type or modified signaling agent is IL-2. In such an embodiment, the modified signaling agent has reduced affinity and/or activity for IL-2Rα and/or IL-2Rβ and/or IL-2Rγ. In some embodiments, the modified signaling agent has reduced affinity and/or activity for IL-2Rβ and/or IL-2Rγ. In some embodiments, the modified signaling agent has substantially reduced or ablated affinity and/or activity for IL-2Rα. Such embodiments may be relevant for treatment of cancer, for instance when the modified IL-2 is agonistic at IL-2Rβ and/or IL-2Rγ. For instance, the present constructs may favor attenuated activation of CD8⁺ T cells (which can provide an anti-tumor effect), which have IL2 receptors β and γ and disfavor T_{regs} (which can provide an immune suppressive, pro-tumor effect), which have IL2 receptors α, β, and γ. Further, in some embodiments, the preferences for IL-2Rβ and/or IL-2Rγ over IL-2Rα avoid IL-2 side effects such as pulmonary edema. Also, IL-2-based Fc-based chimeric protein complexes are useful for the treatment of diseases (e.g., autoimmune disease), for instance when the modified IL-2 is antagonistic (e.g. natural antagonistic activity or antagonistic activity that is the result of one or more mutations, see, e.g., WO 2015/007520, the entire contents of which are hereby incorporated by reference) at IL-2Rβ and/or IL-2Rγ. For instance, the present constructs may favor attenuated suppression of CH′ T cells (and therefore dampen the immune response), which have IL2 receptors β and γ and disfavor T_{regs} which have IL2 receptors α, β, and γ. Alternatively, in some embodiments, the Fc-based chimeric protein complexes bearing IL-2 favor the activation of T_{regs}, and therefore immune suppression, and activation of disfavor of CD8⁺ T cells. For instance, these constructs find use in the treatment of diseases or diseases that would benefit from immune suppression, e.g., autoimmune disorders.

[0286] In some embodiments, the Fc-based chimeric protein complex has targeting moieties as described herein directed to CD8⁺ T cells as well as a modified IL-2 agent having reduced affinity and/or activity for IL-2Rβ and/or IL-2Rγ and/or substantially reduced or ablated affinity and/or activity for IL-2Rα. In some embodiments, these constructs provide targeted CD8⁺ T cell activity and are generally inactive (or have substantially reduced activity) towards T_{reg} cells. In some embodiments, such constructs have enhanced immune stimulatory effect compared to wild type IL-2 (e.g., without wishing to be bound by theory, by not stimulating Tregs), whilst eliminating or reducing the systemic toxicity associated with IL-2.

[0287] In an embodiment, the wild type IL-2 has the amino acid sequence of:

(SEQ ID NO: 18)
[sequence omitted]

[0288] In such embodiments, the modified IL-2 agent has one or more mutations at amino acids L72 (L72G, L72A, L72S, L72T, L72Q, L72E, L72N, L72D, L72R, or L72K), F42 (F42A, F42G, F42S, F42T, F42Q, F42E, F42N, F42D, F42R, or F42K) and Y45 (Y45A, Y45G, Y45S, Y45T, Y45Q, Y45E, Y45N, Y45D, Y45R or Y45K). Without wishing to be bound by theory, it is believed that these modified IL-2 agents have reduced affinity for the high-affinity IL-2 receptor and preserves affinity to the intermediate-affinity IL-2 receptor, as compared to the wild-type IL-2. See, for example, US Patent Publication No. 2012/0244112, the entire contents of which are hereby incorporated by reference.

[0289] In some embodiments, the modified IL-2 agent has one or more mutations at amino acids R38, F42, Y45, and E62. For example, the modified IL-2 agent may comprise one or more of R38A, F42A, Y45A, and E62A. In some embodiments, the modified IL-2 agent may comprise a mutation at C125. For example, the mutation may be C125S. In such embodiments, the modified IL-2 agent may have substantially reduced affinity and/or activity for IL-2Rα, as described in, for example, Carmenate et al. (2013) The Journal of Immunology, 190:6230-6238, the entire disclosure of which is hereby incorporated by reference. In some embodiments, the modified IL-2 agent with mutations at R38, F42, Y45, and/or E62 is able to induce an expansion of effector cells including CD8+ T cells and NK cells but not Treg cells. In some embodiments, the modified IL-2 agent with mutations at R38, F42, Y45, and/or E62 is less toxic than wildtype IL-2 agents. An Fc-based chimeric protein complex comprising the modified IL-2 agent with substantially reduced affinity and/or activity for IL-2Rα may find application in oncology for example.

[0290] In some embodiments, the modified IL-2 signaling agent comprises a deletion of the Ala at the N-terminus of SEQ ID NO: 18. In some embodiments, the modified IL-2 agent comprises the substitution of a Ser for the Cys at position 125 of SEQ ID NO: 18. In some embodiments, the modified IL-2 agent comprises a deletion of the Ala at the N-terminus and the substitution of a Ser for the Cys at position 125 of SEQ ID NO: 18.

[0291] In other embodiments, the modified IL-2 agent may have substantially reduced affinity and/or activity for IL-2Rβ, as described in, for example, WO2016/025385, the entire disclosure of which is hereby incorporated by reference. In such embodiments, the modified IL-2 agent may induce an expansion of Treg cells but not effector cells such as CD8+ T cells and NK cells. An Fc-based chimeric protein complex comprising the modified IL-2 agent with substantially reduced affnity and/or activity for IL-2Rβ may find application in the treatment of autoimmune disease for example. In some embodiments, the modified IL-2 agent may comprise one or more mutations at amino acids N88, D20, and/or A126. For example, the modified IL-2 agent may comprise one or more of N88R, N88I, N88G, D2OH, Q126L, and Q126F.

[0292] In various embodiments, the modified IL-2 agent may comprise a mutation at D109 or C125. For example, the mutation may be D109C or C125S. In some embodiments, the modified IL-2 with a mutation at D109 or C125 may be utilized for attachment to a PEG moiety.

[0293] In an embodiment, the wild type or modified signaling agent is IL-3. In some embodiments, the modified signaling agent has reduced affinity and/or activity for the IL-3 receptor, which is a heterodimer with a unique alpha chain paired with the common beta (beta c or CD131) subunit. In some embodiments, the modified signaling agent has substantially reduced or ablated affinity and/or activity for the IL-3 receptor, which is a heterodimer with a unique alpha chain paired with the common beta (beta c or CD131) subunit.

[0294] In an embodiment, the wild type or modified signaling agent is IL-4. In such an embodiment, the modified signaling agent has reduced affinity and/or activity for type 1 and/or type 2 IL-4 receptors. In such an embodiment, the modified signaling agent has substantially reduced or ablated affinity and/or activity for type 1 and/or type 2 IL-4 receptors. Type 1 IL-4 receptors are composed of the IL-4Ra subunit with a common γ chain and specifically bind IL-4. Type 2 IL-4 receptors include an IL-4Ra subunit bound to a different subunit known as IL-13Ra1. In some embodiments, the modified signaling agent has substantially reduced or ablated affinity and/or activity the type 2 IL-4 receptors.

[0295] In an embodiment, the wild type IL-4 has the amino acid sequence of:

(SEQ ID NO: 19)
HKCIDITLQEIIKTLNSLTEQKTLCTELTVTDIFAASKNTTEKETFCRAA
TVLRQFYSHHEKDTIRCLGATAQQFHRHKQUIRFLKRLDRNLWGLAGLNS
CPVKEANQSTLENFLERLKTIMREKYSKOSS.

[0296] In such embodiments, the modified IL-4 agent has one or more mutations at amino acids R121 (R121A, R121D, R121E, R121F, R121H, R1211, R121K, R121N, R121P, R121T, R121W), E122 (E122F), Y124 (Y124A, Y124Q, Y124R, Y124S, Y124T) and S125 (S125A). Without wishing to be bound by theory, it is believed that these modified IL-4 agents maintain the activity mediated by the type I receptor, but significantly reduces the biological activity mediated by the other receptors. See, for example, U.S. Pat. No. 6,433,157, the entire contents of which are hereby incorporated by reference.

[0297] In an embodiment, the wild type or modified signaling agent is IL-6. IL-6 signals through a cell-surface type I cytokine receptor complex including the ligand-binding IL-6R chain (CD126), and the signal-transducing component gp130. IL-6 may also bind to a soluble form of IL-6R (sIL-6R), which is the extracellular portion of IL-6R. The sIL-6R/IL-6 complex may be involved in neurites outgrowth and survival of neurons and, hence, may be important in nerve regeneration through remyelination. Accordingly, in some embodiments, the modified signaling agent has reduced affinity and/or activity for IL-6R/gp130 and/or sIL-6R. In some embodiments, the modified signaling agent has substantially reduced or ablated affinity and/or activity for IL-6R/gp130 and/or sIL-6R.

[0298] In an embodiment, the wild type IL-6 has the amino acid sequence of:

(SEQ ID NO: 20)
APVPPGEDSKDVAAPHRQPLTSSERIDKQIRYILDGISALRKETCNKSNM
CESSKEALAENNLNLPKMAEKDGCFQSGFNEETCLVKIITGLLEFEVYLE
YLQNRFESSEEQARAVQMSTKVLIQFLQKKAKNLDAITTPDPTTNASLTT
KLQAQNQWLQDMTTHLILRSFKEFLQSSLRALRQM.

[0299] In such embodiments, the modified signaling agent has one or more mutations at amino acids 58, 160, 163, 171 or 177. Without wishing to be bound by theory, it is believed that these modified IL-6 agents exhibit reduced binding affinity to IL-6Ralpha and reduced biological activity. See, for example, WO 97/10338, the entire contents of which are hereby incorporated by reference.

[0300] In an embodiment, the wild type or modified signaling agent is IL-10. In such an embodiment, the modified signaling agent has reduced affinity and/or activity for IL-10 receptor-1 and IL-10 receptor-2. In some embodiments, the modified signaling agent has substantially reduced or ablated affinity and/or activity for IL-10 receptor-1 and IL-10 receptor-2

[0301] In an embodiment, the wild type or modified signaling agent is IL-11. In such an embodiment, the modified signaling agent has reduced affinity and/or activity for IL-11Rα and/or IL-11Rβ and/or gp130. In such an embodiment, the modified signaling agent has substantially reduced or ablated affinity and/or activity for IL-11Rα and/or IL-11Rβ and/or gp130.

[0302] In an embodiment, the wild type or modified signaling agent is IL-12. In such an embodiment, the modified signaling agent has reduced affinity and/or activity for IL-12Rβ1 and/or IL-12Rβ2. In such an embodiment, the modified signaling agent has substantially reduced or ablated affinity and/or activity for IL-12Rβ1 and/or IL-12Rβ2. In an embodiment, the wild type or modified signaling agent is IL-13. In such an embodiment, the modified signaling agent has reduced affinity and/or activity for the IL-4 receptor (IL-4Rα) and IL-13Rα1. In some embodiments, the modified signaling agent has substantially reduced or ablated affinity and/or activity for IL-4 receptor (IL-4Rα) or IL-13Rα1.

[0303] In an embodiment, the wild type IL-13 has the amino acid sequence of:

(SEQ ID NO: 21)
SPGPVPPSTALRELIEELVNITQNQKAPLCNGSMVWSINLTAGMYCAALE
SLINVSGCSAIEKTQRMLSGFCPHKVSAGQFSSLHVRDTKIEVAQFVKDL
LLHLKKLFREGRFN.

[0304] In such embodiments, the modified IL-13 agent has one or more mutations at amino acids 13, 16, 17, 66, 69, 99, 102, 104, 105, 106, 107, 108, 109, 112, 113 and 114. Without wishing to be bound by theory, it is believed that these modified IL-13 agents exhibit reduced biological activity. See, for example, WO 2002/018422, the entire contents of which are hereby incorporated by reference.

[0305] In an embodiment, the signaling agent is a wild type or modified IL-15. In embodiments, the modified IL-15 has reduced affinity and/or activity for interleukin 15 receptor.

[0306] In an embodiment, the wild type IL-15 has the amino acid sequence of: SEQ ID NO: 1564.

[0307] In such embodiments, the modified IL-15 agent has one or more mutations at amino acids S7, D8, K10, K11, E46, L47, V49, 150, D61, N65, L66, I67, I68, L69, N72, Q108.

[0308] In an embodiment, the wild type or modified signaling agent is IL-18. In some embodiments, the modified signaling agent has reduced affinity and/or activity for IL-18Rα and/or IL-18Rβ. In some embodiments, the modified signaling agent has substantially reduced or ablated affinity and/or activity for IL-18Rα and/or IL-18Rβ. In some embodiments, the modified signaling agent has substantially reduced or ablated affinity and/or activity for IL-18Rα type II, which is an isoform of IL-18Rα that lacks the TIR domain required for signaling.

[0309] In an embodiment, the wild type IL-18 has the amino acid sequence of:

(SEQ ID NO: 22)
MAAEPVEDNCINFVAMKFIDNTLYFIAEDDENLESDYFGKLESKLSVIRN
LNDQVLFIDQGNRPLFEDMTDSDCRDNAPRTIFIISMYKDSQPRGMAVTI
SVKCEKISTLSCENKIISFKEMNPPDNIKDTKSDIIFFQRSVPGHDNKMQ
FESSSYEGYFLACEKERDLFKLILKKEDELGDRSIMFTVQNEDL.

[0310] In such embodiments, the modified IL-18 agent may comprise one or more mutations in amino acids or amino acid regions selected from Y37-K44, R49-Q54, D59-R63, E67-C74, R80, M87-A97, N 127-K129, Q139-M149, K165-K171, R183 and Q190-N191, as described in WO/2015/007542, the entire contents of which are hereby incorporated by reference (numbering based on the human IL-18 sequence, Genbank accession number AAV38697, version AAV38697.1, GI: 54696650).

[0311] In an embodiment, the wild type or modified signaling agent is IL-33. In such an embodiment, the modified signaling agent has reduced affinity and/or activity for the ST-2 receptor and IL-1RAcP. In some embodiments, the modified signaling agent has substantially reduced or ablated affinity and/or activity for the ST-2 receptor and IL-1RAcP.

[0312] In an embodiment, the wild type IL-33 has the amino acid sequence of:

(SEQ ID NO: 23)
MKPKMKYSTNKISTAKWKNTASKALCFKLGKSQQKAKEVCPMYFMKLRSG
LMIKKEACYFRRETTKRPSLKTGRKHKRHLVLAACQQQSTVECFAFGISG
VQKYTRALHDSSITGISPITEYLASLSTYNDQSITFALEDESYEIYVEDL
KKDEKKDKVLLSYYESQHPSNESGDGVDGKMLMVTLSPTKDFWLHANNKE
HSVELHKCEKPLPDQAFFVLHNMHSNCVSFECKTDPGVFIGVKDNHLALI
KVDSSENLCTENILFKLSET.

[0313] In such embodiments, the modified IL-33 agent may comprise one or more mutations in amino acids or amino acid regions selected from I113-Y122, S127-E139, E144-D157, Y163-M183, E200, Q215, L220-C227 and T260-E269, as described in WO/2015/007542, the entire contents of which are hereby incorporated by reference (numbering based on the human sequence, Genbank accession number NP_254274, version NP_254274.1, GI:15559209).

[0314] In an embodiment, the modified signaling agent is epidermal growth factor (EGF). EGF is a member of a family of potent growth factors. Members include EGF, HB-EGF, and others such as TGFalpha, amphiregulin, neuregulins, epiregulin, betacellulin. EGF family receptors include EGFR (ErbB1), ErbB2, ErbB3 and ErbB4. These may function as homodimeric and/or heterodimeric receptor subtypes. The different EGF family members exhibit differential selectivity for the various receptor subtypes. For example, EGF associates with ErbB1/ErbB1, ErbB1/ErbB2, ErbB4/ErbB2 and some other heterodimeric subtypes. HB-EGF has a similar pattern, although it also associates with ErbB4/4. Modulation of EGF (EGF-like) growth factor signaling, positively or negatively, is of considerable therapeutic interest. For example, inhibition of EGFRs signaling is of interest in the treatment of various cancers where EGFR signaling constitutes a major growth-promoting signal. Alternatively, stimulation of EGFRs signaling is of therapeutic interest in, for example, promoting wound healing (acute and chronic), oral mucositis (a major side-effect of various cancer therapies, including, without limitation radiation therapy).

[0315] In some embodiments, the modified signaling agent has reduced affinity and/or activity for ErbB1, ErbB2, ErbB3, and/or ErbB4. Such embodiments find use, for example, in methods of treating wounds. In some embodiments, the modified signaling agent binds to one or more ErbB1, ErbB2, ErbB3, and ErbB4 and antagonizes the activity of the receptor. In such embodiments, the modified signaling agent has reduced affinity and/or activity for ErbB1, ErbB2, ErbB3, and/or ErbB4 which allows for the activity of the receptor to be antagonized in an attenuated fashion. Such embodiments find use in, for example, treatments of cancer. In an embodiment, the modified signaling agent has reduced affinity and/or activity for ErbB1. ErbB1 is the therapeutic target of kinase inhibitors—most have side effects because they are not very selective (e.g., gefitinib, erlotinib, afatinib, brigatinib and icotinib). In some embodiments, attenuated antagonistic ErbB1 signaling is more on-target and has less side effects than other agents targeting receptors for EGF.

[0316] In some embodiments, the modified signaling agent has reduced affinity and/or activity (e.g. antagonistic e.g. natural antagonistic activity or antagonistic activity that is the result of one or more mutations, see, e.g., WO 2015/007520, the entire contents of which are hereby incorporated by reference) for ErbB1 and/or substantially reduced or ablated affinity and/or activity for ErbB4 or other subtypes it may interact with. Through specific targeting via the targeting moiety, cell-selective suppression (antagonism e.g. natural antagonistic activity or antagonistic activity that is the result of one or more mutations, see, e.g., WO 2015/007520, the entire contents of which are hereby incorporated by reference) of ErbB1/ErbB1 receptor activation would be achieved—while not engaging other receptor subtypes potentially associated with inhibition-associated side effects. Hence, in contrast to EGFR kinase inhibitors, which inhibit EGFR activity in all cell types in the body, such a construct would provide a cell-selective (e.g., tumor cell with activated EGFR signaling due to amplification of receptor, overexpression etc.) anti-EGFR (ErbB1) drug effect with reduced side effects.

[0317] In some embodiments, the modified signaling agent has reduced affinity and/or activity (e.g. agonistic) for ErbB4 and/or other subtypes it may interact with. Through targeting to specific target cells through the targeting moiety, a selective activation of ErbB1 signaling is achieved (e.g. epithelial cells). Such a construct finds use, in some embodiments, in the treatment of wounds (promoting would healing) with reduced side effects, especially for treatment of chronic conditions and application other than topical application of a therapeutic (e.g. systemic wound healing).

[0318] In an embodiment, the wild type or modified signaling agent is insulin or insulin analogs. In some embodiments, the modified insulin or insulin analog has reduced affinity and/or activity for the insulin receptor and/or IGF1 or IGF2 receptor. In some embodiments, the modified insulin or insulin analog has substantially reduced or ablated affinity and/or activity for the insulin receptor and/or IGF1 or IGF2 receptor. Attenuated response at the insulin receptor allows for the control of diabetes, obesity, metabolic disorders and the like while directing away from IGF1 or IGF2 receptor avoids pro-cancer effects.

[0319] In an embodiment, the wild type or modified signaling agent is insulin-like growth factor-I or insulin-like growth factor-II (IGF-1 or IGF-2). In an embodiment, the modified signaling agent is IGF-1. In such an embodiment, the modified signaling agent has reduced affinity and/or activity for the insulin receptor and/or IGF1 receptor. In an embodiment, the modified signaling agent may bind to the IGF1 receptor and antagonize the activity of the receptor. In such an embodiment, the modified signaling agent has reduced affinity and/or activity for IGF1 receptor that allows for the activity of the receptor to be antagonized in an attenuated fashion. In some embodiments, the modified signaling agent has substantially reduced or ablated affinity and/or activity for the insulin receptor and/or IGF1 receptor. In some embodiments, the modified signaling agent has reduced affinity and/or activity for IGF2 receptor that allows for the activity of the receptor to be antagonized in an attenuated fashion. In an embodiment, the modified signaling agent has substantially reduced or ablated affinity and/or activity for the insulin receptor and accordingly does not interfere with insulin signaling. In various embodiments, this applies to cancer treatment. In various embodiments, the present agents may prevent IR isoform A from causing resistance to cancer treatments.

[0320] In some embodiments, the wild type or modified signaling agent is EPO. In various embodiments, the modified EPO agent has reduced affinity and/or activity for the EPO receptor (EPOR) receptor and/or the ephrin receptor (EphR) relative to wild type EPO or other EPO based agents described herein. In some embodiments, the modified EPO agent has substantially reduced or ablated affinity and/or activity for the EPO receptor (EPOR) receptor and/or the Eph receptor (EphR). Illustrative EPO receptors include, but are not limited to, an EPOR homodimer or an EPOR/CD131 heterodimer. Also included as an EPO receptor is beta-common receptor (βcR). Illustrative Eph receptors include, but are not limited to, EPHA1, EPHA2, EPHA3, EPHA4, EPHA5, EPHA6, EPHA7, EPHA8, EPHA9, EPHA10, EPHB1, EPHB2, EPHB3, EPHB4, EPHB5, and EPHB6. In some embodiments, the modified EPO protein comprises one or more mutations that cause the EPO protein to have reduced affinity for receptors that comprise one or more different EPO receptors or Eph receptors (e.g. heterodimer, heterotrimers, etc., including by way of non-limitation: EPOR-EPHB4, EPOR-βcR-EPOR). Also provided are the receptors of EP Patent Publication No. 2492355 the entire contents of which are hereby incorporated by reference, including by way of non-limitation, NEPORs.

[0321] In some embodiments, the human EPO has the amino acid sequence of (the first 27 amino acids are the signal peptide):

(SEQ ID NO: 24)
MGVHECPAWLWLLLSLLSLPLGLPVLGAPPRLICDSRVLERYLLEAKEAE
NITTGCAEHCSLNENITVPDTKVNFYAWKRMEVGQQAVEVWQGLALLSEA
VLRGQALLVNSSQPWEPLQLHVDKAVSGLRSLTTLLRALGAQKEAISPPD
AASAAPLRTITADTFRKLFRVYSNFLRGKLKLYTGEACRTGDR.

[0322] In some embodiments, the human EPO protein is the mature form of EPO (with the signal peptide being cleaved off) which is a glycoprotein of 166 amino acid residues having the sequence of:

(SEQ ID NO: 25)
APPRLICDSRVLERYLLEAKEAENITTGCAEHCSLNENITVPDTKVNFYA
WKRMEVGQQAVEVWQGLALLSEAVLRGQALLVNSSQPWEPLQLHVDKAVS
GLRSLTTLLRALGAQKEAISPPDAASAAPLRTITADTFRKLFRVYSNFLR
GKLKLYTGEACRTGDR.

[0323] The structure of the human EPO protein is predicted to comprise four-helix bundles including helices A, B, C, and D. In various embodiments, the modified EPO protein comprises one or more mutations located in four regions of the EPO protein which are important for bioactivity, i.e., amino acid residues 10-20, 44-51, 96-108, and 142-156. In some embodiments, the one or more mutations are located at residues 11-15, 44-51, 100-108, and 147-151. These residues are localized to helix A (Val11, Arg14, and Tyr15), helix C (Ser100, Arg103, Ser104, and Leu108), helix D (Asn147, Arg150, Gly151, and Leu155), and the A/B connecting loop (residues 42-51). In some embodiments, the modified EPO protein comprises mutations in residues between amino acids 41-52 and amino acids 147, 150, 151, and 155. Without wishing to be bound by theory, it is believed that mutations of these residues have substantial effects on both receptor binding and in vitro biological activity. In some embodiments, the modified EPO protein comprises mutations at residues 11, 14, 15, 100, 103, 104, and 108. Without wishing to be bound by theory, it is believed that mutations of these residues have modest effects on receptor binding activity and much greater effects on in vitro biological activity. Illustrative substitutions include, but are not limited to, one or more of Val11Ser, Arg14Ala, Arg14Gln, Tyr15Ile, Pro42Asn, Thr44Ile, Lys45Asp, Val46Ala, Tyr51Phe, Ser100Glu, Ser100Thr, Arg103Ala, Ser104Ile, Ser104Ala, Leu108Lys, Asn147Lys, Arg150Ala, Gly151Ala, and Leu155Ala.

[0324] In some embodiments, the modified EPO protein comprises mutations that effect bioactivity and not binding, e.g. those listed in Eliot, et al. Mapping of the Active Site of Recombinant Human Erythropoietin Jan. 15, 1997; Blood: 89 (2), the entire contents of which are hereby incorporated by reference.

[0325] In some embodiments, the modified EPO protein comprises one or more mutations involving surface residues of the EPO protein that are involved in receptor contact. Without wishing to be bound by theory, it is believed that mutations of these surface residues are less likely to affect protein folding thereby retaining some biological activity. Illustrative surface residues that may be mutated include, but are not limited to, residues 147 and 150. In illustrative embodiments, the mutations are substitutions including, one or more of N147A, N147K, R150A and R150E.

[0326] In some embodiments, the modified EPO protein comprises one or more mutations at residues N59, E62, L67, and L70, and one or more mutations that affect disulfide bond formation. Without wishing to be bound by theory, it is believed that these mutations affect folding and/or are predicted be in buried positions and thus affects biological activity indirectly.

[0327] In an embodiment, the modified EPO protein comprises a K20E substitution which significantly reduces receptor binding. See Elliott, et al., (1997) Blood, 89:493-502, the entire contents of which are hereby incorporated by reference.

[0328] Additional EPO mutations that may be incorporated into the chimeric EPO protein of the invention are disclosed in, for example, Elliott, et al., (1997) Blood, 89:493-502, the entire contents of which are hereby incorporated by reference and Taylor et al., (2010) PEDS, 23(4): 251-260, the entire contents of which are hereby incorporated by reference.

[0329] In some embodiments, the signaling agent is a toxin or toxic enzyme. In some embodiments, the toxin or toxic enzyme is derived from plants and bacteria. Illustrative toxins or toxic enzymes include, but are not limited to, the diphtheria toxin, Pseudomonas toxin, anthrax toxin, ribosome-inactivating proteins (RIPs) such as ricin and saporin, modeccin, abrin, gelonin, and poke weed antiviral protein. Additional toxins include those disclosed in Mathew et al., (2009) Cancer Sci 100(8): 1359-65, the entire disclosures are hereby incorporated by reference. In such embodiments, the Fc-based chimeric protein complex of the invention may be utilized to induce cell death in cell-type specific manner. In such embodiments, the toxin may be modified, e.g. mutated, to reduce affinity and/or activity of the toxin for an attenuated effect, as described with other signaling agents herein.

### Targeting Moieties (TM)

[0330] In some embodiments, the targeting moiety is a protein-based agent capable of specific binding, such as an antibody or derivatives thereof.

[0331] In some embodiments, the targeting moiety comprises antibody derivatives or formats. In some embodiments, the targeting moiety of the present Fc-based chimeric protein complex is a single-domain antibody, a recombinant heavy-chain-only antibody (VHH), a single-chain antibody (scFv), a shark heavy-chain-only antibody (VNAR), a microprotein (cysteine knot protein, knottin), a DARPin; a Tetranectin; an Affibody; a Transbody; an Anticalin; an AdNectin; an Affilin; a Microbody; a peptide aptamer; an alterases; a plastic antibodies; a phylomer; a stradobodies; a maxibodies; an evibody; a fynomer, an armadillo repeat protein, a Kunitz domain, an avimer, an atrimer, a probody, an immunobody, a triomab, a troybody; a pepbody; a vaccibody, a UniBody; affimers, a DuoBody, a Fv, a Fab, a Fab′, a F(ab′)₂, a peptide mimetic molecule, or a small (e.g. synthetic or natural) molecule, e.g. without limitation, as described in Patent Publication Nos. or U.S. Pat. No. 7,417,130, US 2004/132094, U.S. Pat. No. 5,831,012, US 2004/023334, U.S. Pat. Nos. 7,250,297, 6,818,418, US 2004/209243, U.S. Pat. Nos. 7,838,629, 7,186,524, 6,004,746, 5,475,096, US 2004/146938, US 2004/157209, U.S. Pat. Nos. 6,994,982, 6,794,144, US 2010/239633, U.S. Pat. No. 7,803,907, US 2010/119446, and/or U.S. Pat. No. 7,166,697, the contents of which are hereby incorporated by reference in their entireties. See also, Storz MAbs. 2011 May-June; 3(3): 310-317.

[0332] In one embodiment, the targeting moiety comprises a single-domain antibody, such as VHH from, for example, an organism that produces VHH antibody such as a camelid, a shark, or a designed VHH. VHHs are antibody-derived therapeutic proteins that contain the unique structural and functional properties of naturally-occurring heavy-chain antibodies. VHH technology is based on fully functional antibodies from camelids that lack light chains. These heavy-chain antibodies contain a single variable domain (VHH) and two constant domains (CH2 and CH3).

[0333] In an embodiment, the targeting moiety comprises a VHH. In some embodiments, the VHH is a humanized VHH or camelized VHH.

[0334] In some embodiments, the VHH comprises a fully human VH domain, e.g. a HUMABODY (Crescendo Biologics, Cambridge, UK). In some embodiments, fully human VH domain, e.g. a HUMABODY is monovalent, bivalent, or trivalent. In some embodiments, the fully human VH domain, e.g. a HUMABODY is mono- or multi-specific such as monospecific, bispecific, or trispecific. Illustrative fully human VH domains, e.g. HUMABODIES are described in, for example, WO 2016/113555 and WO2016/113557, the entire disclosure of which is incorporated by reference.

[0335] In various embodiments, the target (e.g. antigen, receptor) of interest can be found on one or more immune cells, which can include, without limitation, T cells, cytotoxic T lymphocytes, T helper cells, natural killer (NK) cells, natural killer T (NKT) cells, anti-tumor macrophages (e.g. M1 macrophages), B cells, dendritic cells, or subsets thereof. In some embodiments, the recognition domains specifically bind to a target (e.g. antigen, receptor) of interest and effectively, directly or indirectly, recruit one of more immune cells. In some embodiments, the target (e.g. antigen, receptor) of interest can be found on one or more tumor cells. In some embodiments, the present Fc-based chimeric protein complexes may directly or indirectly recruit an immune cell, e.g., in some embodiments, to a therapeutic site (e.g. a locus with one or more disease cell or cell to be modulated for a therapeutic effect). In some embodiments, the present Fc-based chimeric protein complexes may directly or indirectly recruit an immune cell, e.g. an immune cell that can kill and/or suppress a tumor cell, to a site of action (such as, by way of non-limiting example, the tumor microenvironment).

[0336] In various embodiments, the targeting moieties can directly or indirectly recruit cells, such as disease cells and/or effector cells. In some embodiments, the present Fc-based chimeric protein complexes are capable of, or find use in methods involving, shifting the balance of immune cells in favor of immune attack of a tumor. For instance, the present Fc-based chimeric protein complexes can shift the ratio of immune cells at a site of clinical importance in favor of cells that can kill and/or suppress a tumor (e.g. T cells, cytotoxic T lymphocytes, T helper cells, natural killer (NK) cells, natural killer T (NKT) cells, anti-tumor macrophages (e.g. M1 macrophages), B cells, dendritic cells, or subsets thereof) and in opposition to cells that protect tumors (e.g. myeloid-derived suppressor cells (MDSCs), regulatory T cells (Tregs); tumor associated neutrophils (TANs), M2 macrophages, tumor associated macrophages (TAMs), or subsets thereof). In some embodiments, the present Fc-based chimeric protein complex is capable of increasing a ratio of effector T cells to regulatory T cells.

[0337] For example, in some embodiments, the recognition domains specifically bind to a target (e.g. antigen, receptor) associated with T cells. In some embodiments, the recognition domains directly or indirectly recruit T cells. In an embodiment, the recognition domains specifically bind to effector T cells. In some embodiments, the recognition domain directly or indirectly recruits effector T cells, e.g., in some embodiments, to a therapeutic site (e.g. a locus with one or more disease cell or cell to be modulated for a therapeutic effect). Illustrative effector T cells include cytotoxic T cells (e.g. αβ TCR, CD3⁺, CD8⁺, CD45RO⁺); CD4⁺ effector T cells (e.g. αβ TCR, CD3⁺, CD4⁺, CCR7⁺, CD62Lhi, IL⁻7R/CD127⁺); CD8⁺ effector T cells (e.g. αβ TCR, CD3⁺, CD8⁺, CCR7⁺, CD62Lhi, IL⁻7R/CD127⁺); effector memory T cells (e.g. CD62Llow, CD44⁺, TCR, CD3⁺, IL⁻7R/CD127⁺, IL-15R⁺, CCR7low); central memory T cells (e.g. CCR7⁺, CD62L⁺, CD27⁺; or CCR7hi, CD44⁺, CD62Lhi, TCR, CD3⁺, IL-7R/CD127⁺, IL-15R⁺); CD62L⁺ effector T cells; CD8⁺ effector memory T cells (TEM) including early effector memory T cells (CD27⁺CD62L⁻) and late effector memory T cells (CD27⁻CD62L⁻) (TemE and TemL, respectively); CD127(⁺)CD25(low/−) effector T cells; CD127(⁻)CD25(⁻) effector T cells; CD8⁺ stem cell memory effector cells (TSCM) (e.g. CD44(low)CD62L(high)CD122(high)sca(⁺); TH1 effector T-cells (e.g. CXCR3⁺, CXCR6⁺ and CCR5⁺; or αβ TCR, CD3⁺, CD4⁺, IL-12R⁺, IFNγR⁺, CXCR3⁺), TH2 effector T cells (e.g. CCR3⁺, CCR4⁺ and CCR8⁺, or αβTCR, CD3⁺, CD4⁺, IL-4R⁺, IL-33R⁺, CCR4⁺, IL-17RB⁺, CRTH2⁺); TH9 effector T cells (e.g. αβ TCR, CD3⁺, CD4⁺); TH17 effector T cells (e.g. αβ TCR, CD3⁺, CD4⁺, IL-23R⁺, CCR6⁺, IL-1R⁺); CD4⁺CD45RO⁺CCR7⁺ effector T cells, ICOS⁺ effector T cells; CD4⁺CD45RO⁺CCR7(⁻) effector T cells; and effector T cells secreting IL-2, IL-4 and/or IFN-γ.

[0338] Illustrative T cell antigens of interest include, for example (and inclusive of the extracellular domains, where applicable): CD8, CD3, SLAMF4, IL-2Rα, 4-1BB/TNFRSF9, IL-2 R β, ALCAM, B7-1, IL-4 R, B7-H3, BLAME/SLAMFS, CEACAM1, IL-6 R, CCR3, IL-7 Rα, CCR4, CXCRI/IL-S RA, CCR5, CCR6, IL-10Rα, CCR7, IL-I 0 R β, CCRS, IL-12 R β1, CCR9, IL-12 R β2, CD2, IL-13 R α 1, IL-13, CD3, CD4, ILT2/CDS5j, ILT3/CDS5k, ILT4/CDS5d, ILT5/CDS5a, lutegrin α 4/CD49d, CDS, Integrin α E/CD103, CD6, Integrin α M/CD 11 b, CDS, Integrin α X/CD11c, Integrin β 2/CDIS, KIR/CD15S, CD27/TNFRSF7, KIR2DL1, CD2S, KIR2DL3, CD30/TNFRSFS, KIR2DL4/CD15Sd, CD31/PECAM-1, KIR2DS4, CD40 Ligand/TNFSF5, LAG-3, CD43, LAIR1, CD45, LAIR2, CDS3, Leukotriene B4-R1, CDS4/SLAMF5, NCAM-L1, CD94, NKG2A, CD97, NKG2C, CD229/SLAMF3, NKG2D, CD2F-10/SLAMF9, NT-4, CD69, NTB-A/SLAMF6, Common γ Chain/IL-2 R γ, Osteopontin, CRACC/SLAMF7, PD-1, CRTAM, PSGL-1, CTLA-4, RANK/TNFRSF11A, CX3CR1, CX3CL1, L-Selectin, CXCR3, SIRP β 1, CXCR4, SLAM, CXCR6, TCCR/WSX-1, DNAM-1, Thymopoietin, EMMPRIN/CD147, TIM-1, EphB6, TIM-2, Fas/TNFRSF6, TIM-3, Fas Ligand/TNFSF6, TIM-4, Fcγ RIII/CD16, TIM-6, TNFR1/TNFRSF1A, Granulysin, TNF RIII/TNFRSF1B, TRAIL RI/TNFRSFIOA, ICAM-1/CD54, TRAIL R2/TNFRSF10B, ICAM-2/CD102, TRAILR3/TNFRSF10C, IFN-γR1, TRAILR4/TNFRSF10D, IFN-γ R2, TSLP, IL-1 R1 and TSLP R. In various embodiments, a targeting moiety of the Fc-based chimeric protein complex binds one or more of these illustrative T cell antigens.

[0339] In various embodiments, the targeting moiety of the present Fc-based chimeric protein complex is a protein-based agent capable of specific binding to a cell receptor, such as a natural ligand for the cell receptor. In various embodiments, the cell receptor is found on one or more immune cells, which can include, without limitation, T cells, cytotoxic T lymphocytes, T helper cells, natural killer (NK) cells, natural killer T (NKT) cells, anti-tumor macrophages (e.g. M1 macrophages), B cells, dendritic cells, or subsets thereof. In some embodiments, the cell receptor is found on megakaryocytes, thrombocytes, erythrocytes, mast cells, basophils, neutrophils, eosinophils, or subsets thereof.

[0340] In some embodiments, the targeting moiety is a natural ligand such as a chemokine. Exemplary chemokines that may be included in the Fc-based chimeric protein complex of the invention include, but are not limited to, CCL1, CCL2, CCL4, CCL5, CCL6, CCL7, CCL8, CCL9, CCL10, CCL11, CCL12, CCL13, CCL14, CCL15, CCL16, CL17, CCL18, CCL19, CCL20, CCL21, CCL22, CCL23, CCL24, CLL25, CCL26, CCL27, CXCL1, CXCL2, CXCL3, CXCL4, CXCL5, CXCL6, CXCL7, CXCL8, CXCL9, CXCL10, CXCL11, CXCL12, CXCL13, CXCL14, CXCL15, CXCL16, CXCL17, XCL1, XCL2, CX3CL1, HCC-4, and LDGF-PBP. In an illustrative embodiment, the targeting moiety may be XCL1 which is a chemokine that recognizes and binds to the dendritic cell receptor XCR1. In another illustrative embodiment, the targeting moiety is CCL1, which is a chemokine that recognizes and binds to CCR8. In another illustrative embodiment, the targeting moiety is CCL2, which is a chemokine that recognizes and binds to CCR2 or CCR9. In another illustrative embodiment, the targeting moiety is CCL3, which is a chemokine that recognizes and binds to CCR1, CCR5, or CCR9. In another illustrative embodiment, the targeting moiety is CCL4, which is a chemokine that recognizes and binds to CCR1 or CCR5 or CCR9. In another illustrative embodiment, the targeting moiety is CCL5, which is a chemokine that recognizes and binds to CCR1 or CCR3 or CCR4 or CCR5. In another illustrative embodiment, the targeting moiety is CCL6, which is a chemokine that recognizes and binds to CCR1. In another illustrative embodiment, the targeting moiety is CCL7, which is a chemokine that recognizes and binds to CCR2 or CCR9. In another illustrative embodiment, the targeting moiety is CCL8, which is a chemokine that recognizes and binds to CCR1 or CCR2 or CCR2B or CCR5 or CCR9. In another illustrative embodiment, the targeting moiety is CCL9, which is a chemokine that recognizes and binds to CCR1. In another illustrative embodiment, the targeting moiety is CCL10, which is a chemokine that recognizes and binds to CCR1. In another illustrative embodiment, the targeting moiety is CCL11, which is a chemokine that recognizes and binds to CCR2 or CCR3 or CCR5 or CCR9. In another illustrative embodiment, the targeting moiety is CCL13, which is a chemokine that recognizes and binds to CCR2 or CCR3 or CCR5 or CCR9. In another illustrative embodiment, the targeting moiety is CCL14, which is a chemokine that recognizes and binds to CCR1 or CCR9. In another illustrative embodiment, the targeting moiety is CCL15, which is a chemokine that recognizes and binds to CCR1 or CCR3. In another illustrative embodiment, the targeting moiety is CCL16, which is a chemokine that recognizes and binds to CCR1, CCR2, CCR5, or CCR8. In another illustrative embodiment, the targeting moiety is CCL17, which is a chemokine that recognizes and binds to CCR4. In another illustrative embodiment, the targeting moiety is CCL19, which is a chemokine that recognizes and binds to CCR7. In another illustrative embodiment, the targeting moiety is CCL20, which is a chemokine that recognizes and binds to CCR6. In another illustrative embodiment, the targeting moiety is CCL21, which is a chemokine that recognizes and binds to CCR7. In another illustrative embodiment, the targeting moiety is CCL22, which is a chemokine that recognizes and binds to CCR4. In another illustrative embodiment, the targeting moiety is CCL23, which is a chemokine that recognizes and binds to CCR1. In another illustrative embodiment, the targeting moiety is CCL24, which is a chemokine that recognizes and binds to CCR3. In another illustrative embodiment, the targeting moiety is CCL25, which is a chemokine that recognizes and binds to CCR9. In another illustrative embodiment, the targeting moiety is CCL26, which is a chemokine that recognizes and binds to CCR3. In another illustrative embodiment, the targeting moiety is CCL27, which is a chemokine that recognizes and binds to CCR10. In another illustrative embodiment, the targeting moiety is CCL28, which is a chemokine that recognizes and binds to CCR3 or CCR10.

[0341] In another illustrative embodiment, the targeting moiety is CXCL1, which is a chemokine that recognizes and binds to CXCR1 or CXCR2. In another illustrative embodiment, the targeting moiety is CXCL2, which is a chemokine that recognizes and binds to CXCR2. In another illustrative embodiment, the targeting moiety is CXCL3, which is a chemokine that recognizes and binds to CXCR2. In another illustrative embodiment, the targeting moiety is CXCL4, which is a chemokine that recognizes and binds to CXCR3B. In another illustrative embodiment, the targeting moiety is CXCL5, which is a chemokine that recognizes and binds to CXCR2. In another illustrative embodiment, the targeting moiety is CXCL6, which is a chemokine that recognizes and binds to CXCR1 or CXCR2.

[0342] In another illustrative embodiment, the targeting moiety is CXCL8, which is a chemokine that recognizes and binds to CXCR1 or CXCR2. In another illustrative embodiment, the targeting moiety is CXCL9, which is a chemokine that recognizes and binds to CXCR3. In another illustrative embodiment, the targeting moiety is CXCL10, which is a chemokine that recognizes and binds to CXCR3. In another illustrative embodiment, the targeting moiety is CXCL11, which is a chemokine that recognizes and binds to CXCR3 or CXCR7. In another illustrative embodiment, the targeting moiety is CXCL12, which is a chemokine that recognizes and binds to CXCR4 or CXCR7. In another illustrative embodiment, the targeting moiety is CXCL13, which is a chemokine that recognizes and binds to CXCR5. In another illustrative embodiment, the targeting moiety is CXCL16, which is a chemokine that recognizes and binds to CXCR6. In another illustrative embodiment, the targeting moiety is LDGF-PBP, which is a chemokine that recognizes and binds to CXCR2. In another illustrative embodiment, the targeting moiety is XCL2, which is a chemokine that recognizes and binds to XCR1. In another illustrative embodiment, the targeting moiety is CX3CL1, which is a chemokine that recognizes and binds to CX3CR1.

[0343] In some embodiments, the targeting moiety is a natural ligand such as Flt3 or a truncated region thereof. In some embodiments, the targeting moiety is an extracellular domain of Flt3, or a functional portion thereof (e.g. one that is still able to bind the cognate ligand or receptor).

[0344] Functional equivalent of extracellular domains of natural ligands encompass N-terminal and/or C-terminally shortened versions that retain the binding capacitiy of the full-length extracellular domains.

[0345] In some embodiments, the targeting moiety is a NGR peptide or a truncated region thereof.

[0346] By way of non-limiting example, in various embodiments, the present Fc-based chimeric protein complex has a targeting moiety directed against a checkpoint marker expressed on a T cell, e.g. one or more of PD-1, CD28, CTLA4, ICOS, BTLA, KIR, LAG3, CD137, OX40, CD27, CD40L, TIM3, and A2aR.

[0347] In some embodiments, the targeting moiety is an extracellular domain of PD-1, PD-L1, or PD-L2, or a functional portion thereof (e.g. one that is still able to bind the cognate ligand or receptor).

[0348] For example, in some embodiments, the recognition domains specifically bind to a target (e.g. antigen, receptor) associated with B cells. In some embodiments, the recognition domains directly or indirectly recruit B cells, e.g., in some embodiments, to a therapeutic site (e.g. a locus with one or more disease cell or cell to be modulated for a therapeutic effect). Illustrative B cell antigens of interest include, for example, CD10, CD19, CD20, CD21, CD22, CD23, CD24, CD37, CD38, CD39, CD40, CD70, CD72, CD73, CD74, CDw75, CDw76, CD77, CD78, CD79a/b, CD80, CD81, CD82, CD83, CD84, CD85, CD86, CD89, CD98, CD126, CD127, CDw130, CD138, CDw150, and B-cell maturation antigen (BCMA). In various embodiments, a targeting moiety of the Fc-based chimeric protein complex binds one or more of these illustrative B cell antigens.

[0349] By way of further example, in some embodiments, the recognition domains specifically bind to a target (e.g. antigen, receptor) associated with Natural Killer cells. In some embodiments, the recognition domains directly or indirectly recruit Natural Killer cells, e.g., in some embodiments, to a therapeutic site (e.g. a locus with one or more disease cell or cell to be modulated for a therapeutic effect). Illustrative Natural Killer cell antigens of interest include, for example TIGIT, 2B4/SLAMF4, KIR2DS4, CD155/PVR, KIR3DL1, CD94, LMIR1/CD300A, CD69, LMIR2/CD300c, CRACC/SLAMF7, LMIR3/CD300LF, DNAM-1, LMIR5/CD300LB, Fc-epsilon RII, LMIR6/CD300LE, Fc-γ RI/CD64, MICA, Fc-γ RIIB/CD32b, MICB, Fc-γ RIIC/CD32c, MULT-1, Fc-γ RIIA/CD32a, Nectin-2/CD112, Fc-γ RIII/CD16, NKG2A, FcRH1/IRTA5, NKG2C, FcRH2/IRTA4, NKG2D, FcRH4/IRTA1, NKp30, FcRH5/IRTA2, NKp44, Fc-Receptor-like 3/CD16-2, NKp46/NCR1, NKp80/KLRF1, NTB-A/SLAM F6, Rae-1, Rae-1 α, Rae-1 β, Rae-1 delta, H60, Rae-1 epsilon, ILT2/CD85j, Rae-1 γ, ILT3/CD85k, TREM-1, ILT4/CD85d, TREM-2, ILT5/CD85a, TREM-3, KIR/CD158, TREML1/TLT-1, KIR2DL1, ULBP-1, KIR2DL3, ULBP-2, KIR2DL4/CD158d and ULBP-3. In various embodiments, a targeting moiety of the Fc-based chimeric protein complex binds one or more of these illustrative NK cell antigens.

[0350] Also, in some embodiments, the recognition domains specifically bind to a target (e.g. antigen, receptor) associated with macrophages/monocytes. In some embodiments, the recognition domains directly or indirectly recruit macrophages/monocytes, e.g., in some embodiments, to a therapeutic site (e.g. a locus with one or more disease cell or cell to be modulated for a therapeutic effect). Illustrative macrophages/monocyte antigens of interest include, for example SIRP1a, B7-1/CD80, ILT4/CD85d, B7-H1, ILT5/CD85a, Common β Chain, Integrin α 4/CD49d, BLAME/SLAMF8, Integrin α X/CDIIc, CCL6/C10, Integrin β 2/CD18, CD155/PVR, Integrin β 3/CD61, CD31/PECAM-1, Latexin, CD36/SR-B3, Leukotriene B4 R1, CD40/TNFRSF5, LIMPIIISR-B2, CD43, LMIR1/CD300A, CD45, LMIR2/CD300c, CD68, LMIR3/CD300LF, CD84/SLAMF5, LMIR5/CD300LB, CD97, LMIR1/CD300LE, CD163, LRP-1, CD2F-10/SLAMF9, MARCO, CRACC/SLAMF7, MD-1, ECF-L, MD-2, EMMPRIN/CD147, MGL2, Endoglin/CD105, Osteoactivin/GPNMB, Fc-γ RI/CD64, Osteopontin, Fc-γ RIIB/CD32b, PD-L2, Fc-γ RIIC/CD32c, Siglec-3/CD33, Fc-γ RIIA/CD32a, SIGNR1/CD209, Fc-γ RIII/CD16, SLAM, GM-CSF R α, TCCR/WSX-1, ICAM-2/CD102, TLR3, IFN-γ RI, TLR4, IFN-γ R2, TREM-I, IL-I RII, TREM-2, ILT2/CD85j, TREM-3, ILT3/CD85k, TREML1/TLT-1, 2B4/SLAMF 4, IL-10 R α, ALCAM, IL-10 R β, AminopeptidaseN/ANPEP, ILT2/CD85j, Common β Chain, ILT3/CD85k, Clq R1/CD93, ILT4/CD85d, CCR1, ILT5/CD85a, CCR2, Integrin α 4/CD49d, CCR5, Integrin α M/CDII b, CCR8, Integrin α X/CDIIc, CD155/PVR, Integrin β 2/CD18, CD14, Integrin β 3/CD61, CD36/SR-B3, LAIR1, CD43, LAIR2, CD45, Leukotriene B4-R1, CD68, LIMPIIISR-B2, CD84/SLAMF5, LMIR1/CD300A, CD97, LMIR2/CD300c, LMIR3/CD300LF, Coagulation Factor III/Tissue Factor, LMIR5/CD300LB, CX3CR1, CX3CL1, LMIR6/CD300LE, CXCR4, LRP-1, CXCR6, M-CSF R, DEP-1/CD148, MD-1, DNAM-1, MD-2, EMMPRIN/CD147, MMR, Endoglin/CD105, NCAM-L1, Fc-γ RI/CD64, PSGL-1, Fc-γ RIIIICD16, RP105, G-CSF R, L-Selectin, GM-CSF R α, Siglec-3/CD33, HVEM/TNFRSF14, SLAM, ICAM-1/CD54, TCCR/WSX-1, ICAM-2/CD102, TREM-1, IL-6 R, TREM-2, CXCRI/IL-8 RA, TREM-3 and TREMLI/TLT-1. In various embodiments, a targeting moiety of the Fc-based chimeric protein complex binds one or more of these illustrative macrophage/monocyte antigens.

[0351] Also, in some embodiments, the recognition domains specifically bind to a target (e.g. antigen, receptor) associated with dendritic cells. In some embodiments, the recognition domains directly or indirectly recruit dendritic cells, e.g., in some embodiments, to a therapeutic site (e.g. a locus with one or more disease cell or cell to be modulated for a therapeutic effect). Illustrative dendritic cell antigens of interest include, for example, CLEC9A, XCR1, RANK, CD36/SRB3, LOX-1/SR-E1, CD68, MARCO, CD163, SR-A1/MSR, CD5L, SREC-1, CL-PI/COLEC12, SREC-II, LIMPIIISRB2, RP105, TLR4, TLR1, TLR5, TLR2, TLR6, TLR3, TLR9, 4-IBB Ligand/TNFSF9, IL-12/IL-23 p40, 4-Amino-1,8-naphthalimide, ILT2/CD85j, CCL21/6Ckine, ILT3/CD85k, 8-oxo-dG, ILT4/CD85d, 8D6A, ILT5/CD85a, A2B5, lutegrin α 4/CD49d, Aag, Integrin β 2/CD18, AMICA, Langerin, B7-2/CD86, Leukotriene B4 RI, B7-H3, LMIR1/CD300A, BLAME/SLAMF8, LMIR2/CD300c, Clq R1/CD93, LMIR3/CD300LF, CCR6, LMIR5/CD300LB CCR7, LMIR6/CD300LE, CD40/TNFRSF5, MAG/Siglec-4-a, CD43, MCAM, CD45, MD-1, CD68, MD-2, CD83, MDL-1/CLEC5A, CD84/SLAMF5, MMR, CD97, NCAMLI, CD2F-10/SLAMF9, Osteoactivin GPNMB, Chern 23, PD-L2, CLEC-1, RP105, CLEC-2, CLEC-8, Siglec-2/CD22, CRACC/SLAMF7, Siglec-3/CD33, DC-SIGN, Siglec-5, DC-SIGNR/CD299, Siglec-6, DCAR, Siglec-7, DCIR/CLEC4A, Siglec-9, DEC-205, Siglec-10, Dectin-1/CLEC7A, Siglec-F, Dectin-2/CLEC6A, SIGNR1/CD209, DEP-1/CD148, SIGNR4, DLEC, SLAM, EMMPRIN/CD147, TCCR/WSX-1, Fc-γ R1/CD64, TLR3, Fc-γ RIIB/CD32b, TREM-1, Fc-γ RIIC/CD32c, TREM-2, Fc-γ RIIA/CD32a, TREM-3, Fc-γ RIII/CD16, TREML1/TLT-1, ICAM-2/CD102 and Vanilloid R1. In various embodiments, a targeting moiety of the Fc-based chimeric protein complex binds one or more of these illustrative DC antigens.

[0352] In some embodiments, the recognition domains specifically bind to a target (e.g. antigen, receptor) on immune cells selected from, but not limited to, megakaryocytes, thrombocytes, erythrocytes, mast cells, basophils, neutrophils, eosinophils, or subsets thereof. In some embodiments, the recognition domains directly or indirectly recruit megakaryocytes, thrombocytes, erythrocytes, mast cells, basophils, neutrophils, eosinophils, or subsets thereof, e.g., in some embodiments, to a therapeutic site (e.g. a locus with one or more disease cell or cell to be modulated for a therapeutic effect).

[0353] In some embodiments, the recognition domains specifically bind to a target (e.g. antigen, receptor) associated with megakaryocytes and/or thrombocytes. Illustrative megakaryocyte and/or thrombocyte antigens of interest include, for example, GP IIb/IIIa, GPIb, vWF, PF4, and TSP. In various embodiments, a targeting moiety of the Fc-based chimeric protein complex binds one or more of these illustrative megakaryocyte and/or thrombocyte antigens.

[0354] In some embodiments, the recognition domains specifically bind to a target (e.g. antigen, receptor) associated with erythrocytes. Illustrative erythrocyte antigens of interest include, for example, CD34, CD36, CD38, CD41a (platelet glycoprotein IIb/IIIa), CD41b (GPIIb), CD71 (transferrin receptor), CD105, glycophorin A, glycophorin C, c-kit, HLA-DR, H2 (MHC-II), and Rhesus antigens. In various embodiments, a targeting moiety of the Fc-based chimeric protein complex binds one or more of these illustrative erythrocyte antigens.

[0355] In some embodiments, the recognition domains specifically bind to a target (e.g. antigen, receptor) associated with mast cells. Illustrative mast cells antigens of interest include, for example, SCFR/CD117, Fc_{ε}RI, CD2, CD25, CD35, CD88, CD203c, C5R1, CMAI, FCERIA, FCER2, TPSABI. In various embodiments, a targeting moiety of the Fc-based chimeric protein complex binds one or more of these mast cell antigens.

[0356] In some embodiments, the recognition domains specifically bind to a target (e.g. antigen, receptor) associated with basophils. Illustrative basophils antigens of interest include, for example, Fc_{ε}RI, CD203c, CD123, CD13, CD107a, CD107b, and CD164. In various embodiments, a targeting moiety of the Fc-based chimeric protein complex binds one or more of these basophil antigens.

[0357] In some embodiments, the recognition domains specifically bind to a target (e.g. antigen, receptor) associated with neutrophils. Illustrative neutrophils antigens of interest include, for example, 7D5, CD10/CALLA, CD13, CD16 (FcRIII), CD18 proteins (LFA-1, CR3, and p150, 95), CD45, CD67, and CD177. In various embodiments, a targeting moiety of the Fc-based chimeric protein complex binds one or more of these neutrophil antigens.

[0358] In some embodiments, the recognition domains specifically bind to a target (e.g. antigen, receptor) associated with eosinophils. Illustrative eosinophils antigens of interest include, for example, CD35, CD44 and CD69. In various embodiments, a targeting moiety of the Fc-based chimeric protein complex binds one or more of these eosinophil antigens.

[0359] In various embodiments, the recognition domain may bind to any appropriate target, antigen, receptor, or cell surface markers known by the skilled artisan. In some embodiments, the antigen or cell surface marker is a tissue-specific marker. Illustrative tissue-specific markers include, but are not limited to, endothelial cell surface markers such as ACE, CD14, CD34, CDH5, ENG, ICAM2, MCAM, NOS3, PECAMI, PROCR, SELF, SELP, TEK, THBD, VCAMI, VWF; smooth muscle cell surface markers such as ACTA2, MYHIO, MYHI 1, MYH9, MYOCD; fibroblast (stromal) cell surface markers such as ALCAM, CD34, COLIAI, COL1A2, COL3A1, FAP, PH-4; epithelial cell surface markers such as CDID, K6IRS2, KRTIO, KRT13, KRT17, KRT18, KRT19, KRT4, KRT5, KRT8, MUCI, TACSTDI; neovasculature markers such as CD13, TFNA, Alpha-v beta-3 (α_{V}β₃), E-selectin; and adipocyte surface markers such as ADIPOQ, FABP4, and RETN. In various embodiments, a targeting moiety of the Fc-based chimeric protein complex binds one or more of these antigens. In various embodiments, a targeting moiety of the Fc-based chimeric protein complex binds one or more of cells having these antigens.

[0360] In some embodiments, the recognition domains specifically bind to a target (e.g. antigen, receptor) associated with tumor cells. In some embodiments, the recognition domains directly or indirectly recruit tumor cells. For instance, in some embodiments, the direct or indirect recruitment of the tumor cell is to one or more effector cell (e.g. an immune cell as described herein) that can kill and/or suppress the tumor cell.

[0361] Tumor cells or cancer cells refer to an uncontrolled growth of cells or tissues and/or an abnormal increase in cell survival and/or inhibition of apoptosis which interferes with the normal functioning of bodily organs and systems.

[0362] For example, tumor cells include benign and malignant cancers, polyps, hyperplasia, as well as dormant tumors or micrometastases. Illustrative tumor cells include, but are not limited to cells of: basal cell carcinoma, biliary tract cancer; bladder cancer; bone cancer; brain and central nervous system cancer; breast cancer; cancer of the peritoneum; cervical cancer; choriocarcinoma; colon and rectum cancer; connective tissue cancer; cancer of the digestive system; endometrial cancer; esophageal cancer; eye cancer; cancer of the head and neck; gastric cancer (including gastrointestinal cancer); glioblastoma; hepatic carcinoma; hepatoma; intra-epithelial neoplasm; kidney or renal cancer; larynx cancer; leukemia; liver cancer; lung cancer (e.g., small-cell lung cancer, non-small cell lung cancer, adenocarcinoma of the lung, and squamous carcinoma of the lung); melanoma; myeloma; neuroblastoma; oral cavity cancer (lip, tongue, mouth, and pharynx); ovarian cancer; pancreatic cancer; prostate cancer; retinoblastoma; rhabdomyosarcoma; rectal cancer; cancer of the respiratory system; salivary gland carcinoma; sarcoma; skin cancer; squamous cell cancer; stomach cancer; testicular cancer; thyroid cancer; uterine or endometrial cancer; cancer of the urinary system; vulval cancer; lymphoma including Hodgkin's and non-Hodgkin's lymphoma, as well as B-cell lymphoma (including low grade/follicular non-Hodgkin's lymphoma (NHL); small lymphocytic (SL) NHL; intermediate grade/follicular NHL; intermediate grade diffuse NHL; high grade immunoblastic NHL; high grade lymphoblastic NHL; high grade small non-cleaved cell NHL; bulky disease NHL; mantle cell lymphoma; AIDS-related lymphoma; and Waldenstrom's Macroglobulinemia; chronic lymphocytic leukemia (CLL); acute lymphoblastic leukemia (ALL); Hairy cell leukemia; chronic myeloblastic leukemia; as well as other carcinomas and sarcomas; and post-transplant lymphoproliferative disorder (PTLD), as well as abnormal vascular proliferation associated with phakomatoses, edema (e.g. that associated with brain tumors), and Meigs' syndrome.

[0363] Tumor cells, or cancer cells also include, but are not limited to, carcinomas, e.g. various subtypes, including, for example, adenocarcinoma, basal cell carcinoma, squamous cell carcinoma, and transitional cell carcinoma), sarcomas (including, for example, bone and soft tissue), leukemias (including, for example, acute myeloid, acute lymphoblastic, chronic myeloid, chronic lymphocytic, and hairy cell), lymphomas and myelomas (including, for example, Hodgkin and non-Hodgkin lymphomas, light chain, non-secretory, MGUS, and plasmacytomas), and central nervous system cancers (including, for example, brain (e.g. gliomas (e.g. astrocytoma, oligodendroglioma, and ependymoma), meningioma, pituitary adenoma, and neuromas, and spinal cord tumors (e.g. meningiomas and neurofibroma).

[0364] Illustrative tumor antigens include, but are not limited to, MART-1/Melan-A, gp100, Dipeptidyl peptidase IV (DPPIV), adenosine deaminase-binding protein (ADAbp), cyclophilin b, Colorectal associated antigen (CRC)-0017-1A/GA733, Carcinoembryonic Antigen (CEA) and its immunogenic epitopes CAP-1 and CAP-2, etv6, aml1, Prostate Specific Antigen (PSA) and its immunogenic epitopes PSA-1, PSA-2, and PSA-3, prostate-specific membrane antigen (PSMA), T-cell receptor/CD3-zeta chain, MAGE-family of tumor antigens (e.g., MAGE-A1, MAGE-A2, MAGE-A3, MAGE-A4, MAGE-A5, MAGE-A6, MAGE-A7, MAGE-A8, MAGE-A9, MAGE-A10, MAGE-A11, MAGE-A12, MAGE-Xp2 (MAGE-B2), MAGE-Xp3 (MAGE-B3), MAGE-Xp4 (MAGE-B4), MAGE-C1, MAGE-C2, MAGE-C3, MAGE-C4, MAGE-05), GAGE-family of tumor antigens (e.g., GAGE-1, GAGE-2, GAGE-3, GAGE-4, GAGE-5, GAGE-6, GAGE-7, GAGE-8, GAGE-9), BAGE, RAGE, LAGE-1, NAG, GnT-V, MUM-1, CDK4, tyrosinase, p53, MUC family, HER2/neu, p21ras, RCAS1, α-fetoprotein, E-cadherin, α-catenin, β-catenin and γ-catenin, p120ctn, gp100 Pmel117, PRAME, NY-ESO-1, cdc27, adenomatous polyposis coli protein (APC), fodrin, Connexin 37, Ig-idiotype, p15, gp75, GM2 and GD2 gangliosides, viral products such as human papilloma virus proteins, Smad family of tumor antigens, Imp-1, NA, EBV-encoded nuclear antigen (EBNA)-1, brain glycogen phosphorylase, SSX-1, SSX-2 (HOM-MEL-40), SSX-1, SSX-4, SSX-5, SCP-1 CT-7, c-erbB-2, CD19, CD20, CD22, CD30, CD33, CD37, CD56, CD70, CD74, CD138, AGS16, MUC1, GPNMB, Ep-CAM, PD-L1, PD-L2, PMSA, and BCMA (TNFRSF17). In various embodiments, a targeting moiety of the Fc-based chimeric protein complex binds one or more of these tumor antigens. In an embodiment, the Fc-based chimeric protein complex binds to HER2.

[0365] In another embodiment, the Fc-based chimeric protein complex binds to PD-L2.

[0366] In various embodiments, the recognition domain of the present Fc-based chimeric protein complex binds but does not functionally modulate the target (e.g. antigen, receptor) of interest, e.g. the recognition domain is, or is akin to, a binding antibody. For instance, in various embodiments, the recognition domain simply targets the antigen or receptor but does not substantially inhibit, reduce or functionally modulate a biological effect that the antigen or receptor has. For example, some of the smaller antibody formats described above (e.g. as compared to, for example, full antibodies) have the ability to target hard to access epitopes and provide a larger spectrum of specific binding locales. In various embodiments, the recognition domain binds an epitope that is physically separate from an antigen or receptor site that is important for its biological activity (e.g. the antigen's active site).

[0367] Such non-neutralizing binding finds use in various embodiments of the present invention, including methods in which the present Fc-based chimeric protein complex is used to directly or indirectly recruit active immune cells to a site of need via an effector antigen, such as any of those described herein. For example, in various embodiments, the present Fc-based chimeric protein complex may be used to directly or indirectly recruit cytotoxic T cells via CD8 to a tumor cell in a method of reducing or eliminating a tumor (e.g. the Fc-based chimeric protein complex may comprise an anti-CD8 recognition domain and a recognition domain directed against a tumor antigen). In such embodiments, it is desirable to directly or indirectly recruit CD8-expressing cytotoxic T cells but not to functionally modulate the CD8 activity. On the contrary, in these embodiments, CD8 signaling is an important piece of the tumor reducing or eliminating effect. By way of further example, in various methods of reducing or eliminating tumors, the present Fc-based chimeric protein complex is used to directly or indirectly recruit dendritic cells (DCs) via CLEC9A (e.g. the Fc-based chimeric protein complex may comprise an anti-CLEC9A recognition domain and a recognition domain directed against a tumor antigen). In such embodiments, it is desirable to directly or indirectly recruit CLEC9A-expressing DCs but not to functionally modulate the CLEC9A activity. On the contrary, in these embodiments, CLEC9A signaling is an important piece of the tumor reducing or eliminating effect.

[0368] In various embodiments, the recognition domain of the present Fc-based chimeric protein complex binds to an immune modulatory antigen (e.g. immune stimulatory or immune inhibitory). In various embodiments, the immune modulatory antigen is one or more of 4-1BB, OX-40, HVEM, GITR, CD27, CD28, CD30, CD40, ICOS ligand; OX-40 ligand, LIGHT (CD258), GITR ligand, CD70, B7-1, B7-2, CD30 ligand, CD40 ligand, ICOS, ICOS ligand, CD137 ligand and TL1A. In various embodiments, such immune stimulatory antigens are expressed on a tumor cell. In various embodiments, the recognition domain of the present Fc-based chimeric protein complex binds but does not functionally modulate such immune stimulatory antigens and therefore allows recruitment of cells expressing these antigens without the reduction or loss of their potential tumor reducing or eliminating capacity.

[0369] In various embodiments, the recognition domain of the present Fc-based chimeric protein complex may be in the context of Fc-based chimeric protein complex that comprises two recognition domains that have neutralizing activity, or comprises two recognition domains that have non-neutralizing (e.g. binding) activity, or comprises one recognition domain that has neutralizing activity and one recognition domain that has non-neutralizing (e.g. binding) activity.

### Clec9A Targeting Moieties

[0370] In some embodiments, the targeting moiety is a Clec9A targeting moiety that is a protein-based agent capable of specific binding to Clec9A. In some embodiments, the Clec9A targeting moiety is a protein-based agent capable of specific binding to Clec9A without functional modulation (e.g., partial or full neutralization) of Clec9A. Clec9A is a group V C-type lectin-like receptor (CTLR) expressed on the surface of a subset of dendritic cells (i.e., BDCA₃+ dendritic cells) specialized for the uptake and processing of materials from dead cells. Clec9A recognizes a conserved component within nucleated and nonnucleated cells, exposed when cell membranes are damaged. Clec9A is expressed at the cell surface as a glycosylated dimer and can mediate endocytosis, but not phagocytosis. Clec9A possesses a cytoplasmic immunoreceptor tyrosine-based activation-like motif that can recruit Syk kinase and induce proinflammatory cytokine production (see Huysamen et al. (2008), JBC, 283:16693-701).

[0371] In various embodiments, the Clec9A targeting moiety comprises an antigen recognition domain that recognizes an epitope present on Clec9A. In an embodiment, the antigen-recognition domain recognizes one or more linear epitopes present on Clec9A. In some embodiments, a linear epitope refers to any continuous sequence of amino acids present on Clec9A. In another embodiment, the antigen-recognition domain recognizes one or more conformational epitopes present on Clec9A. As used herein, a conformation epitope refers to one or more sections of amino acids (which may be discontinuous) which form a three-dimensional surface with features and/or shapes and/or tertiary structures capable of being recognized by an antigen recognition domain.

[0372] In various embodiments, the Clec9A targeting moiety can bind to the full-length and/or mature forms and/or isoforms and/or splice variants and/or fragments and/or any other naturally occurring or synthetic analogs, variants, or mutants of human Clec9A. In various embodiments, the Clec9A targeting moiety can bind to any forms of the human Clec9A, including monomeric, dimeric, heterodimeric, multimeric and associated forms. In an embodiment, the Clec9A binding agent binds to the monomeric form of Clec9A. In another embodiment, the Clec9A targeting moiety binds to a dimeric form of Clec9A. In a further embodiment, the Clec9A targeting moiety binds to glycosylated form of Clec9A, which may be either monomeric or dimeric.

[0373] In an embodiment, the Clec9A targeting moiety an antigen recognition domain that recognizes one or more epitopes present on human Clec9A. In an embodiment, the human Clec9A comprises the amino acid sequence of:

(SEQ ID NO: 26)
MHEEEIYTSLQWDSPAPDTYQKCLSSNKCSGACCLVMVISCVFCMGLLTA
SIFLGVKLLQVSTIAMQQQEKLIQQERALLNFTEWKRSCALQMKYCQAFM
QNSLSSAHNSSPCPNNWIQNRESCYYVSEIWSIWHTSQENCLKEGSTLLQ
IESKEEMDFITGSLRKIKGSYDYWVGLSQDGHSGRWLWQDGSSPSPGLLP
AERSQSANQVCGYVKSNSLLSSNCSTWKYFICEKYALRSSV.

[0374] In various embodiments, the Clec9A targeting moiety is capable of specific binding. In various embodiments, the Clec9A targeting moiety comprises an antigen recognition domain such as an antibody or derivatives thereof.

[0375] In some embodiments, the Clec9A targeting moiety comprises an antibody derivative or format. In some embodiments, the Clec9A targeting moiety comprises a targeting moiety which is a single-domain antibody, a recombinant heavy-chain-only antibody (VHH), a single-chain antibody (scFv), a shark heavy-chain-only antibody (VNAR), a microprotein (cysteine knot protein, knottin), a DARPin; a Tetranectin; an Affibody; a Transbody; an alphabody; a bicyclic peptide; an Anticalin; an AdNectin; an Affilin; an Affimer, a Microbody; an aptamer; an alterase; a plastic antibody; a phylomer; a stradobody; a maxibody; an evibody; a fynomer, an armadillo repeat protein, a Kunitz domain, an avimer, an atrimer, a probody, an immunobody, a triomab, a troybody; a pepbody; a vaccibody, a UniBody; a DuoBody, a Fv, a Fab, a Fab′, a F(ab′)₂, a peptide mimetic molecule, or a small (e.g. synthetic or natural) molecule, e.g. without limitation, as described in Patent Publication Nos. or U.S. Pat. No. 7,417,130, US 2004/132094, U.S. Pat. No. 5,831,012, US 2004/023334, U.S. Pat. Nos. 7,250,297, 6,818,418, US 2004/209243, U.S. Pat. Nos. 7,838,629, 7,186,524, 6,004,746, 5,475,096, US 2004/146938, US 2004/157209, U.S. Pat. Nos. 6,994,982, 6,794,144, US 2010/239633, U.S. Pat. No. 7,803,907, US 2010/119446, and/or U.S. Pat. No. 7,166,697, the contents of which are hereby incorporated by reference in their entireties. See also, Storz MAbs. 2011 May-June; 3(3): 310-317.

[0376] In some embodiments, the Clec9A targeting moiety is a single-domain antibody, such as a VHH. The VHH may be derived from, for example, an organism that produces VHH antibody such as a camelid, a shark, or the VHH may be a designed VHH. VHHs are antibody-derived therapeutic proteins that contain the unique structural and functional properties of naturally-occurring heavy-chain antibodies. VHH technology is based on fully functional antibodies from camelids that lack light chains. These heavy-chain antibodies contain a single variable domain (V_{H}H) and two constant domains (CH2 and CH3).

[0377] In an embodiment, the Clec9A targeting moiety comprises a VHH. In some embodiments, the VHH is a humanized VHH or camelized VHH.

[0378] In some embodiments, the VHH comprises a fully human VH domain, e.g. a HUMABODY (Crescendo Biologics, Cambridge, UK). In some embodiments, fully human VH domain, e.g. a HUMABODY is monovalent, bivalent, or trivalent. In some embodiments, the fully human VH domain, e.g. a HUMABODY is mono- or multi-specific such as monospecific, bispecific, or trispecific. Illustrative fully human VH domains, e.g. HUMABODIES are described in, for example, WO2016/113555 and WO2016/113557, the entire disclosure of which is incorporated by reference.

[0379] In some embodiments, the Clec9A targeting moiety is a VHH comprising a single amino acid chain having four “framework regions” or FRs and three “complementary determining regions” or CDRs. As used herein, “framework region” or “FR” refers to a region in the variable domain which is located between the CDRs. As used herein, “complementary determining region” or “CDR” refers to variable regions in VHHs that contains the amino acid sequences capable of specifically binding to antigenic targets.

[0380] In various embodiments, the Clec9A targeting moiety comprises a VHH having a variable domain comprising at least one CDR1, CDR2, and/or CDR3 sequences. In various embodiments, the Clec9A targeting moiety comprises a VHH having a variable region comprising at least one FR1, FR2, FR3, and FR4 sequences.

[0381] In some embodiments, the CDR1 sequence is selected from SEQ ID Nos: 27-112.

[0382] In some embodiments, the CDR2 sequence is selected from SEQ ID Nos: 113-200.

[0383] In some embodiments, the CDR3 sequence is selected from SEQ ID Nos: 201-287, LGR, and VIK.

[0384] In an exemplary embodiment, the Clec9A targeting moiety comprises SEQ ID NO: 27, SEQ ID NO: 113, and SEQ ID NO: 201.

[0385] In an exemplary embodiment, the Clec9A targeting moiety comprises SEQ ID NO: 28, SEQ ID NO: 114, and SEQ ID NO: 202.

[0386] In an exemplary embodiment, the Clec9A targeting moiety comprises SEQ ID NO: 29, SEQ ID NO: 115, and SEQ ID NO: 202.

[0387] In an exemplary embodiment, the Clec9A targeting moiety comprises SEQ ID NO: 27, SEQ ID NO: 116, and SEQ ID NO: 203.

[0388] In an exemplary embodiment, the Clec9A targeting moiety comprises SEQ ID NO: 30, SEQ ID NO: 117, and SEQ ID NO: 205.

[0389] In an exemplary embodiment, the Clec9A targeting moiety comprises SEQ ID NO: 31, SEQ ID NO: 118, and SEQ ID NO: 205.

[0390] In an exemplary embodiment, the Clec9A targeting moiety comprises SEQ ID NO: 32, SEQ ID NO: 119, and SEQ ID NO: 206.

[0391] In an exemplary embodiment, the Clec9A targeting moiety comprises SEQ ID NO: 33, SEQ ID NO: 120, and SEQ ID NO: 207.

[0392] In an exemplary embodiment, the Clec9A targeting moiety comprises SEQ ID NO: 33, SEQ ID NO: 120, and SEQ ID NO: 208.

[0393] In an exemplary embodiment, the Clec9A targeting moiety comprises SEQ ID NO: 33, SEQ ID NO: 120, and SEQ ID NO: 209.

[0394] In an exemplary embodiment, the Clec9A targeting moiety comprises SEQ ID NO: 34, SEQ ID NO: 121, and SEQ ID NO: 210.

[0395] In an exemplary embodiment, the Clec9A targeting moiety comprises SEQ ID NO: 35, SEQ ID NO: 122, and SEQ ID NO: 211.

[0396] In an exemplary embodiment, the Clec9A targeting moiety comprises SEQ ID NO:35, SEQ ID NO: 122, and SEQ ID NO: 212.

[0397] In an exemplary embodiment, the Clec9A targeting moiety comprises SEQ ID NO: 36, SEQ ID NO: 123, and SEQ ID NO: 213.

[0398] In an exemplary embodiment, the Clec9A targeting moiety comprises SEQ ID NO: 37, SEQ ID NO: 124, and SEQ ID NO: 214.

[0399] In an exemplary embodiment, the Clec9A targeting moiety comprises SEQ ID NO: 38, SEQ ID NO: 125, and SEQ ID NO: 214.

[0400] In an exemplary embodiment, the Clec9A targeting moiety comprises SEQ ID NO: 39, SEQ ID NO: 126, and SEQ ID NO: 214.

[0401] In an exemplary embodiment, the Clec9A targeting moiety comprises SEQ ID NO: 40, SEQ ID NO: 127, and SEQ ID NO: 214.

[0402] In an exemplary embodiment, the Clec9A targeting moiety comprises SEQ ID NO: 41, SEQ ID NO: 128, and SEQ ID NO: 214.

[0403] In an exemplary embodiment, the Clec9A targeting moiety comprises SEQ ID NO: 42, SEQ ID NO: 128, and SEQ ID NO: 214.

[0404] In an exemplary embodiment, the Clec9A targeting moiety comprises SEQ ID NO: 43, SEQ ID NO: 129, and SEQ ID NO: 215.

[0405] In an exemplary embodiment, the Clec9A targeting moiety comprises SEQ ID NO: 44, SEQ ID NO: 130, and LGR.

[0406] In an exemplary embodiment, the Clec9A targeting moiety comprises SEQ ID NO: 44, SEQ ID NO: 131, and LGR.

[0407] In an exemplary embodiment, the Clec9A targeting moiety comprises SEQ ID NO: 44, SEQ ID NO: 132, and LGR.

[0408] In an exemplary embodiment, the Clec9A targeting moiety comprises SEQ ID NO: 45, SEQ ID NO: 133, and LGR.

[0409] In an exemplary embodiment, the Clec9A targeting moiety comprises SEQ ID NO: 46, SEQ ID NO: 134, and VIK.

[0410] By way of example, in some embodiments, the Clec9A targeting moiety comprises an amino acid sequence selected from the following sequences:

[0411] R2CHCL8 (SEQ ID NO: 288); R1CHCL50 (SEQ ID NO: 289); R1CHCL21 (SEQ ID NO: 290); R2CHCL87 (SEQ ID NO: 291); R2CHCL24 (SEQ ID NO: 292); R2CHCL38 (SEQ ID NO: 293); R1CHCL16 (SEQ ID NO: 294); R2CHCL10 (SEQ ID NO: 295); R1CHCL34 (SEQ ID NO: 296); R1CHCL82 (SEQ ID NO: 297); R2CHCL3 (SEQ ID NO: 298); R2CHCL69 (SEQ ID NO:299); R1CHCL56 (SEQ ID NO: 300); R2CHCL32 (SEQ ID NO: 301); R2CHCL49 (SEQ ID NO: 302); R2CHCL53 (SEQ ID NO: 303); R2CHCL22 (SEQ ID NO: 304); R2CHCL25 (SEQ ID NO: 305); R2CHCL18 (SEQ ID NO: 306); R1CHCL23 (SEQ ID NO: 307); R1CHCL27 (SEQ ID NO: 308); R2CHCL13 (SEQ ID NO: 309); R2CHCL14 (SEQ ID NO: 310); R2CHCL42 (SEQ ID NO: 311); R2CHCL41 (SEQ ID NO: 312); R2CHCL94 (SEQ ID NO: 313); or R2CHCL27 (SEQ ID NO: 314).

[0412] By way of example, in some embodiments, the Clec9A targeting moiety comprises an amino acid sequence selected from the following sequences:

[0413] 1LEC 7 (SEQ ID NO: 315); 1LEC 9 (SEQ ID NO: 316); 1LEC 26 (SEQ ID NO: 317); 1LEC 27 (SEQ ID NO: 318); 1LEC 28 (SEQ ID NO: 319); 1LEC 30 (SEQ ID NO: 320); 1LEC 38 (SEQ ID NO: 333); 1LEC 42 (SEQ ID NO: 334); 1LEC 51 (SEQ ID NO: 335); 1LEC 61 (SEQ ID NO: 336); 1LEC 62 (SEQ ID NO: 337); 1LEC 63 (SEQ ID NO: 338); 1LEC 64 (SEQ ID NO: 339); 1LEC 70 (SEQ ID NO: 340); 1LEC 84 (SEQ ID NO: 341); 1LEC 88 (SEQ ID NO: 342); 1LEC 91 (SEQ ID NO: 343); 1LEC 92 (SEQ ID NO: 344); 1LEC 94 (SEQ ID NO: 345); 2LEC 6 (SEQ ID NO: 346); 2LEC 13 (SEQ ID NO: 347); 2LEC 16 (SEQ ID NO: 348); 2LEC 20 (SEQ ID NO: 349); 2LEC 23 (SEQ ID NO: 350); 2LEC 24 (SEQ ID NO: 351); 2LEC 26 (SEQ ID NO: 352); 2LEC 38 (SEQ ID NO: 353); 2LEC 48 (SEQ ID NO: 354); 2LEC 53 (SEQ ID NO: 355); 2LEC 54 (SEQ ID NO: 356); 2LEC 55 (SEQ ID NO: 357); 2LEC 59 (SEQ ID NO: 358); 2LEC 60 (SEQ ID NO: 359); 2LEC 61 (SEQ ID NO: 360); 2LEC 62 (SEQ ID NO: 361); 2LEC 63 (SEQ ID NO: 362); 2LEC 67 (SEQ ID NO: 363); 2LEC 68 (SEQ ID NO: 364); 2LEC 76 (SEQ ID NO: 365); 2LEC 83 (SEQ ID NO: 366); 2LEC 88 (SEQ ID NO: 367); 2LEC 89 (SEQ ID NO: 368); 2LEC 90 (SEQ ID NO: 369); 2LEC 93 (SEQ ID NO: 370); 2LEC 95 (SEQ ID NO: 371); 3LEC 4 (SEQ ID NO: 372); 3LEC 6 (SEQ ID NO: 373); 3LEC 9 (SEQ ID NO: 374); 3LEC 11 (SEQ ID NO: 375); 3LEC 13 (SEQ ID NO: 376); 3LEC 15 (SEQ ID NO: 377); 3LEC 22 (SEQ ID NO: 378); 3LEC 23 (SEQ ID NO: 379); 3LEC 27 (SEQ ID NO: 380); 3LEC 30 (SEQ ID NO: 381); 3LEC 36 (SEQ ID NO: 382); 3LEC 55 (SEQ ID NO: 383); 3LEC 57 (SEQ ID NO: 384); 3LEC 61 (SEQ ID NO: 385); 3LEC 62 (SEQ ID NO: 386); 3LEC 66 (SEQ ID NO: 387); 3LEC 69 (SEQ ID NO: 388); 3LEC 76 (SEQ ID NO: 389); 3LEC 82 (SEQ ID NO: 390); 3LEC 89 (SEQ ID NO: 391); or 3LEC 94 (SEQ ID NO: 392).

[0414] In some embodiments, the Clec9A targeting moiety comprises an amino acid sequence selected from SEQ ID Nos: 315-320 and 333-392 (provided above) without the terminal histidine tag sequence (i.e., HHHHHH; SEQ ID NO: 393).

[0415] In some embodiments, the Clec9A targeting moiety comprises an amino acid sequence selected from SEQ ID Nos: 315-320 and 333-392 (provided above) without the HA tag (i.e., YPYDVPDYGS; SEQ ID NO: 394).

[0416] In some embodiments, the Clec9A targeting moiety comprises an amino acid sequence selected from SEQ ID Nos: 315-320 and 333-392 (provided above) without the AAA linker (i.e., MA).

[0417] In some embodiments, the Clec9A targeting moiety comprises an amino acid sequence selected from SEQ ID Nos: 315-320 and 333-392 (provided above) without the AAA linker, HA tag, and terminal histidine tag sequence (i.e., AAAYPYDVPDYGSHHHHHH; SEQ ID NO: 395).

[0418] In an embodiment, the Clec9A targeting moiety comprises the anti-Clec9A antibody as disclosed in Tullett et al., JCI Insight. 2016; 1(7):e87102, the entire disclosures of which are hereby incorporated by reference.

[0419] In some embodiments, the present technology contemplates the use of any natural or synthetic analogs, mutants, variants, alleles, homologs and orthologs (herein collectively referred to as “analogs”) of the Clec9A targeting moieties described herein. In various embodiments, the amino acid sequence of the Clec9A targeting moiety further includes an amino acid analog, an amino acid derivative, or other non-classical amino acids.

[0420] In various embodiments, the Clec9A targeting moiety comprising a sequence that is at least 60% identical to any one of the sequences disclosed herein. For example, the Clec9A targeting moiety may comprise a sequence that is at least about 60%, at least about 61%, at least about 62%, at least about 63%, at least about 64%, at least about 65%, at least about 66%, at least about 67%, at least about 68%, at least about 69%, at least about 70%, at least about 71%, at least about 72%, at least about 73%, at least about 74%, at least about 75%, at least about 76%, at least about 77%, at least about 78%, at least about 79%, at least about 80%, at least about 81%, at least about 82%, at least about 83%, at least about 84%, at least about 85%, at least about 86%, at least about 87%, at least about 88%, at least about 89%, at least about 90%, at least about 91%, at least about 92%, at least about 93%, at least about 94%, at least about 95%, at least about 96%, at least about 97%, at least about 98%, at least about 99%, or 100% identical to any of the Clec9A sequences disclosed herein (e.g. about 60%, or about 61%, or about 62%, or about 63%, or about 64%, or about 65%, or about 66%, or about 67%, or about 68%, or about 69%, or about 70%, or about 71%, or about 72%, or about 73%, or about 74%, or about 75%, or about 76%, or about 77%, or about 78%, or about 79%, or about 80%, or about 81%, or about 82%, or about 83%, or about 84%, or about 85%, or about 86%, or about 87%, or about 88%, or about 89%, or about 90%, or about 91%, or about 92%, or about 93%, or about 94%, or about 95%, or about 96%, or about 97%, or about 98%, about 99% or about 100% sequence identity to any one of the Clec9A sequences disclosed herein).

[0421] In various embodiments, the Clec9A targeting moiety comprising an amino acid sequence having one or more amino acid mutations with respect to any one of the sequences disclosed herein. In various embodiments, the Clec9A targeting moiety comprises an amino acid sequence having one, or two, or three, or four, or five, or six, or seen, or eight, or nine, or ten, or fifteen, or twenty amino acid mutations with respect to any one of the sequences disclosed herein. In some embodiments, the one or more amino acid mutations may be independently selected from substitutions, insertions, deletions, and truncations.

[0422] In some embodiments, the amino acid mutations are amino acid substitutions, and may include conservative and/or non-conservative substitutions.

[0423] “Conservative substitutions” may be made, for instance, on the basis of similarity in polarity, charge, size, solubility, hydrophobicity, hydrophilicity, and/or the amphipathic nature of the amino acid residues involved. The 20 naturally occurring amino acids can be grouped into the following six standard amino acid groups: (1) hydrophobic: Met, Ala, Val, Leu, Ile; (2) neutral hydrophilic: Cys, Ser, Thr; Asn, Gln; (3) acidic: Asp, Glu; (4) basic: His, Lys, Arg; (5) residues that influence chain orientation: Gly, Pro; and (6) aromatic: Trp, Tyr, Phe.

[0424] As used herein, “conservative substitutions” are defined as exchanges of an amino acid by another amino acid listed within the same group of the six standard amino acid groups shown above. For example, the exchange of Asp by Glu retains one negative charge in the so modified polypeptide. In addition, glycine and proline may be substituted for one another based on their ability to disrupt α-helices.

[0425] As used herein, “non-conservative substitutions” are defined as exchanges of an amino acid by another amino acid listed in a different group of the six standard amino acid groups (1) to (6) shown above.

[0426] In various embodiments, the substitutions may also include non-classical amino acids. Exemplary non-classical amino acids include, but are not limited to, selenocysteine, pyrrolysine, N-formylmethionine β-alanine, GABA and δ-Aminolevulinic acid, 4-aminobenzoic acid (PABA), D-isomers of the common amino acids, 2,4-diaminobutyric acid, α-amino isobutyric acid, 4-aminobutyric acid, Abu, 2-amino butyric acid, γ-Abu, ε-Ahx, 6-amino hexanoic acid, Aib, 2-amino isobutyric acid, 3-amino propionic acid, ornithine, norleucine, norvaline, hydroxyproline, sarcosme, citrulline, homocitrulline, cysteic acid, t-butylglycine, t-butylalanine, phenylglycine, cyclohexylalanine, β-alanine, fluoro-amino acids, designer amino acids such as β methyl amino acids, C α-methyl amino acids, N α-methyl amino acids, and amino acid analogs in general.

[0427] In various embodiments, the amino acid mutation may be in the CDRs of the targeting moiety (e.g., the CDR1, CDR2 or CDR3 regions). In another embodiment, amino acid alteration may be in the framework regions (FRs) of the targeting moiety (e.g., the FR1, FR2, FR3, or FR4 regions).

[0428] Modification of the amino acid sequences may be achieved using any known technique in the art e.g., site-directed mutagenesis or PCR based mutagenesis. Such techniques are described, for example, in Sambrook et al., Molecular Cloning: A Laboratory Manual, Cold Spring Harbor Press, Plainview, N.Y., 1989 and Ausubel et al., Current Protocols in Molecular Biology, John Wiley & Sons, New York, N.Y., 1989.

[0429] In various embodiments, the mutations do not substantially reduce the present Clec9A binding agent's capability to specifically bind to Clec9A. In various embodiments, the mutations do not substantially reduce the present Clec9A binding agent's capability to specifically bind to Clec9A and without functionally modulating (e.g., partially or fully neutralizing) Clec9A.

[0430] In various embodiments, the binding affinity of the Clec9A targeting moiety for the full-length and/or mature forms and/or isoforms and/or splice variants and/or fragments and/or monomeric and/or dimeric forms and/or any other naturally occurring or synthetic analogs, variants, or mutants (including monomeric and/or dimeric forms) of human Clec9A may be described by the equilibrium dissociation constant (K_{D}). In various embodiments, the Clec9A targeting moiety binds to the full-length and/or mature forms and/or isoforms and/or splice variants and/or fragments and/or any other naturally occurring or synthetic analogs, variants, or mutants (including monomeric and/or dimeric forms) of human Clec9A with a K_{D} of less than about 1 uM, about 900 nM, about 800 nM, about 700 nM, about 600 nM, about 500 nM, about 400 nM, about 300 nM, about 200 nM, about 100 nM, about 90 nM, about 80 nM, about 70 nM, about 60 nM, about 50 nM, about 40 nM, about 30 nM, about 20 nM, about 10 nM, or about 5 nM, or about 1 nM.

[0431] In various embodiments, the Clec9A targeting moiety binds but does not functionally modulate (e.g., partially or fully neutralize) the antigen of interest, i.e., Clec9A. For instance, in various embodiments, the Clec9A targeting moiety simply targets the antigen but does not substantially functionally modulate (e.g. partially or fully inhibit, reduce or neutralize) a biological effect that the antigen has. In various embodiments, the Clec9A targeting moiety binds an epitope that is physically separate from an antigen site that is important for its biological activity (e.g. an antigen's active site).

[0432] Such binding without significant function modulation finds use in various embodiments of the present invention, including methods in which the Clec9A targeting moiety is used to directly or indirectly recruit active immune cells to a site of need via an effector antigen. For example, in various embodiments, the Clec9A targeting moiety may be used to directly or indirectly recruit dendritic cells via Clec9A to a tumor cell in a method of reducing or eliminating a tumor (e.g. the Clec9A binding agent may comprise a targeting moiety having an anti-Clec9A antigen recognition domain and a targeting moiety having a recognition domain (e.g. antigen recognition domain) directed against a tumor antigen or receptor). In such embodiments, it is desirable to directly or indirectly recruit dendritic cells but not to functionally modulate or neutralize the Clec9A activity. In these embodiments, Clec9A signaling is an important piece of the tumor reducing or eliminating effect.

[0433] In some embodiments, the Clec9A targeting moiety enhances antigen-presentation by dendritic cells. For example, in various embodiments, the Clec9A targeting moiety can directly or indirectly recruit dendritic cells via Clec9A to a tumor cell, where tumor antigens are subsequently endocytosed and presented on the dendritic cell for induction of potent humoral and cytotoxic T cell responses.

[0434] In other embodiments (for example, related to treating autoimmune or neurodegenerative disease), the Clec9A targeting moiety binds and neutralizes the antigen of interest, i.e., Clec9A. For instance, in various embodiments, the present methods may inhibit or reduce Clec9A signaling or expression, e.g. to cause a reduction in an immune response.

### CD8 Targeting Moieties

[0435] In various embodiments, the targeting moiety is a CD8 targeting moiety that is a protein-based agent capable of specific binding to CD8. In various embodiments, the CD8 targeting moiety is a protein-based agent capable of specific binding to CD8 without functionally modulating (e.g. partial or complete neutralization) CD8.

[0436] CD8 is a heterodimeric type I transmembrane glycoprotein, whose α and β chains are both comprised of an immunoglobulin (Ig)-like extracellular domain connected by an extended 0-glycosylated stalk to a single-pass transmembrane domain and a short cytoplasmic tail. The cytoplasmic region of the CD8 α-chain contains two cysteine motifs that serve as a docking site for src tyrosine kinase p56lck (Lck). In contrast, this Lck binding domain appears to be absent from the CD8 β chain, suggesting that the β chain is not involved in downstream signaling. CD8 functions as a co-receptor for the T-cell receptor with its principle role being the recruitment of Lck to the TCR-pMHC complex following co-receptor binding to MHC. The increase in the local concentration of this kinase activates a signaling cascade that recruits and activates ζ-chain-associated protein kinase 70 (ZAP-70), subsequently leading to the amplification of T-cell activation signals.

[0437] In some embodiments, the CD8 targeting moiety comprises an antigen recognition domain that recognizes an epitope present on the CD8 α and/or β chains. In an embodiment, the antigen-recognition domain recognizes one or more linear epitopes on the CD8 α and/or β chains. In some embodiment, a linear epitope refers to any continuous sequence of amino acids present on the CD8 α and/or β chains. In another embodiment, the antigen-recognition domain recognizes one or more conformational epitopes present on the CD8 α and/or β chains. As used herein, a conformation epitope refers to one or more sections of amino acids (which may be discontinuous) which form a three-dimensional surface with features and/or shapes and/or tertiary structures capable of being recognized by an antigen recognition domain.

[0438] In various embodiments, the CD8 targeting moiety may bind to the full-length and/or mature forms and/or isoforms and/or splice variants and/or fragments and/or any other naturally occurring or synthetic analogs, variants, or mutants of human CD8 α and/or β chains. In various embodiments, the CD8 targeting moiety may bind to any forms of the human CD8 α and/or β chains, including monomeric, dimeric, heterodimeric, multimeric and associated forms. In an embodiment, the CD8 binding agent binds to the monomeric form of CD8 α chain or CD8 β chain. In another embodiment, the CD8 targeting moiety binds to a homodimeric form comprised of two CD8 α chains or two CD8 β chains. In a further embodiment, the CD8 binding agent binds to a heterodimeric form comprised of one CD8 α chain and one CD8 β chain.

[0439] In an embodiment, the CD8 targeting moiety comprises an antigen recognition domain that recognizes one or more epitopes present on the human CD8 α chain. In an embodiment, the human CD8 α chain comprises the amino acid sequence of Isoform 1 (SEQ ID NO: 396).

[0440] In an embodiment, the human CD8 α chain comprises the amino acid sequence of Isoform 2 (SEQ ID NO: 397).

[0441] In an embodiment, the human CD8 α chain comprises the amino acid sequence of Isoform 3 (SEQ ID NO: 398).

[0442] In an embodiment, the CD8 targeting moiety comprises an antigen recognition domain that recognizes one or more epitopes present on the human CD8 β chain. In an embodiment, the human CD8 β chain comprises the amino acid sequence of Isoform 1 (SEQ ID NO: 399).

[0443] In an embodiment, the human CD8 β chain comprises the amino acid sequence of Isoform 2 (SEQ ID NO: 400).

[0444] In an embodiment, the human CD8 β chain comprises the amino acid sequence of Isoform 3 (SEQ ID NO: 401).

[0445] In an embodiment, the human CD8 β chain comprises the amino acid sequence of Isoform 4 (SEQ ID NO: 402).

[0446] In an embodiment, the human CD8 β chain comprises the amino acid sequence of Isoform 5 (SEQ ID NO: 403).

[0447] In an embodiment, the human CD8 β chain comprises the amino acid sequence of Isoform 6 (SEQ ID NO: 404).

[0448] In an embodiment, the human CD8 β chain comprises the amino acid sequence of Isoform 7 (SEQ ID NO: 405).

[0449] In an embodiment, the human CD8 β chain comprises the amino acid sequence of Isoform 8 (SEQ ID NO: 406).

[0450] In some embodiments, the CD8 targeting moiety is capable of specific binding. In various embodiments, the CD8 targeting moiety comprises an antigen recognition domain such as an antibody or derivatives thereof.

[0451] In some embodiments, the CD8 targeting moiety comprise an antibody derivative or format. In some embodiments, the CD8 targeting moiety comprises a single-domain antibody, a recombinant heavy-chain-only antibody (VHH), a single-chain antibody (scFv), a shark heavy-chain-only antibody (VNAR), a microprotein (cysteine knot protein, knottin), a DARPin; a Tetranectin; an Affibody; a Transbody; an Anticalin; an AdNectin; an alphabody; a bicyclic peptide; an Affilin; an Affimer, a Microbody; an aptamer; an alterase; a plastic antibody; a phylomer; a stradobody; a maxibody; an evibody; a fynomer, an armadillo repeat protein, a Kunitz domain, an avimer, an atrimer, a probody, an immunobody, a triomab, a troybody; a pepbody; a vaccibody, a UniBody; a DuoBody, a Fv, a Fab, a Fab′, a F(ab′)₂, a peptide mimetic molecule, or a small (e.g. synthetic or natural) molecule, e.g. without limitation, as described in Patent Publication Nos. or U.S. Pat. No. 7,417,130, US 2004/132094, U.S. Pat. No. 5,831,012, US 2004/023334, U.S. Pat. Nos. 7,250,297, 6,818,418, US 2004/209243, U.S. Pat. Nos. 7,838,629, 7,186,524, 6,004,746, 5,475,096, US 2004/146938, US 2004/157209, U.S. Pat. Nos. 6,994,982, 6,794,144, US 2010/239633, U.S. Pat. No. 7,803,907, US 2010/119446, and/or U.S. Pat. No. 7,166,697, the contents of which are hereby incorporated by reference in their entireties. See also, Storz MAbs. 2011 May-June; 3(3): 310-317.

[0452] In some embodiments, the CD8 targeting moiety comprises a single-domain antibody, such as a VHH. The VHH may be derived from, for example, an organism that produces VHH antibody such as a camelid, a shark, or the VHH may be a designed VHH. VHHs are antibody-derived therapeutic proteins that contain the unique structural and functional properties of naturally-occurring heavy-chain antibodies. VHH technology is based on fully functional antibodies from camelids that lack light chains. These heavy-chain antibodies contain a single variable domain (V_{H}H) and two constant domains (CH2 and CH3).

[0453] In an embodiment, the CD8 targeting moiety comprises a VHH. In some embodiments, the VHH is a humanized VHH or camelized VHH.

[0454] In some embodiments, the VHH comprises a fully human VH domain, e.g. a HUMABODY (Crescendo Biologics, Cambridge, UK). In some embodiments, fully human VH domain, e.g. a HUMABODY is monovalent, bivalent, or trivalent. In some embodiments, the fully human VH domain, e.g. a HUMABODY is mono- or multi-specific such as monospecific, bispecific, or trispecific. Illustrative fully human VH domains, e.g. a HUMABODIES are described in, for example, WO2016/113555 and WO2016/113557, the entire disclosure of which is incorporated by reference.

[0455] In some embodiments, the CD8 targeting moiety comprises a VHH comprising a single amino acid chain having four “framework regions” or FRs and three “complementary determining regions” or CDRs. As used herein, “framework region” or “FR” refers to a region in the variable domain that is located between the CDRs. As used herein, “complementary determining region” or “CDR” refers to variable regions in VHHs that contains the amino acid sequences capable of specifically binding to antigenic targets.

[0456] In various embodiments, the CD8 targeting moiety comprises a VHH having a variable domain comprising at least one CDR1, CDR2, and/or CDR3 sequences.

[0457] In some embodiments, the CDR1 sequence is selected from SEQ ID Nos: 407-477.

[0458] In some embodiments, the CDR2 sequence is selected from SEQ ID Nos: 478-548.

[0459] In some embodiments, the CDR3 sequence is selected from SEQ ID Nos: 549-620.

[0460] In various embodiments, the CD8 targeting moiety comprises SEQ ID NO: 407, SEQ ID NO: 478, and SEQ ID NO: 549.

[0461] In various embodiments, the CD8 targeting moiety comprises SEQ ID NO: 407, SEQ ID NO: 478, and SEQ ID NO: 550.

[0462] In various embodiments, the CD8 targeting moiety comprises SEQ ID NO: 407, SEQ ID NO: 478, and SEQ ID NO: 551.

[0463] In various embodiments, the CD8 targeting moiety comprises SEQ ID NO: 407, SEQ ID NO: 479, and SEQ ID NO: 549.

[0464] In various embodiments, the CD8 targeting moiety comprises SEQ ID NO: 407, SEQ ID NO: 479, and SEQ ID NO: 550.

[0465] In various embodiments, the CD8 targeting moiety comprises SEQ ID NO: 407, SEQ ID NO: 479, and SEQ ID NO: 551.

[0466] In various embodiments, the CD8 targeting moiety comprises SEQ ID NO: 408, SEQ ID NO: 478, and SEQ ID NO: 549.

[0467] In various embodiments, the CD8 targeting moiety comprises SEQ ID NO: 408, SEQ ID NO: 478, and SEQ ID NO: 550.

[0468] In various embodiments, the CD8 targeting moiety comprises SEQ ID NO: 408, SEQ ID NO: 478, and SEQ ID NO: 551.

[0469] In various embodiments, the CD8 targeting moiety comprises SEQ ID NO: 408, SEQ ID NO: 479, and SEQ ID NO: 549.

[0470] In various embodiments, the CD8 targeting moiety comprises SEQ ID NO: 408, SEQ ID NO: 479, and SEQ ID NO: 550.

[0471] In various embodiments, the CD8 targeting moiety comprises SEQ ID NO: 408, SEQ ID NO: 479, and SEQ ID NO: 551.

[0472] By way of example, in some embodiments, the CD8 targeting moiety comprises an amino acid sequence selected from the following sequences: R3HCD27 (SEQ ID NO: 621); R3HCD129 (SEQ ID NO: 622); or R2HCD26 (SEQ ID NO: 623).

[0473] In various embodiments, the CD8 targeting moiety comprises an amino acid sequence selected from the following sequences: 1CDA 7 (SEQ ID NO: 624); 1CDA 12 (SEQ ID NO: 625); 1CDA 14 (SEQ ID NO: 626); 1CDA 15 (SEQ ID NO: 627); 1CDA 17 (SEQ ID NO: 628); 1CDA 18 (SEQ ID NO: 629); 1CDA 19 (SEQ ID NO: 630); 1CDA 24 (SEQ ID NO: 631); 1CDA 26 (SEQ ID NO: 632); 1CDA 28 (SEQ ID NO: 633); 1CDA 37 (SEQ ID NO: 634); 1CDA 43 (SEQ ID NO: 635); 1CDA 45 (SEQ ID NO: 636); 1CDA 47 (SEQ ID NO: 637); 1CDA 48 (SEQ ID NO: 638); 1CDA 58 (SEQ ID NO: 639); 1CDA 65 (SEQ ID NO: 640); 1CDA 68 (SEQ ID NO: 641); 1CDA 73 (SEQ ID NO: 642); 1CDA 75 (SEQ ID NO: 643); 1CDA 86 (SEQ ID NO: 644); 1CDA 87 (SEQ ID NO: 645); 1CDA 88 (SEQ ID NO: 646); 1CDA 89 (SEQ ID NO: 647); 1CDA 92 (SEQ ID NO: 648); 1CDA 93 (SEQ ID NO: 649); 2CDA 1 (SEQ ID NO: 650); 2CDA 5 (SEQ ID NO: 651); 2CDA 22 (SEQ ID NO: 652); 2CDA 28 (SEQ ID NO: 653); 2CDA 62 (SEQ ID NO: 654); 2CDA 68 (SEQ ID NO: 655); 2CDA 73 (SEQ ID NO: 656); 2CDA 74 (SEQ ID NO: 657); 2CDA 75 (SEQ ID NO: 658); 2CDA 77 (SEQ ID NO: 659); 2CDA 81 (SEQ ID NO: 660); 2CDA 87 (SEQ ID NO: 661); 2CDA 88 (SEQ ID NO: 662); 2CDA 89 (SEQ ID NO: 663); 2CDA 91 (SEQ ID NO: 664); 2CDA 92 (SEQ ID NO: 665); 2CDA 93 (SEQ ID NO: 666); 2CDA 94 (SEQ ID NO: 667); 2CDA 95 (SEQ ID NO: 668); 3CDA 3 (SEQ ID NO: 669); 3CDA 8 (SEQ ID NO: 670); 3CDA 11 (SEQ ID NO: 671); 3CDA 18 (SEQ ID NO: 672); 3CDA 19 (SEQ ID NO: 673); 3CDA 21 (SEQ ID NO: 674); 3CDA 24 (SEQ ID NO: 675); 3CDA 28 (SEQ ID NO: 676); 3CDA 29 (SEQ ID NO: 677); 3CDA 31 (SEQ ID NO: 678); 3CDA 32 (SEQ ID NO: 679); 3CDA 33 (SEQ ID NO: 680); 3CDA 37 (SEQ ID NO: 681); 3CDA 40 (SEQ ID NO: 682); 3CDA 41 (SEQ ID NO:683); 3CDA 48 (SEQ ID NO: 684); 3CDA 57 (SEQ ID NO: 685); 3CDA 65 (SEQ ID NO: 686); 3CDA 70 (SEQ ID NO: 687); 3CDA 73 (SEQ ID NO: 688); 3CDA 83 (SEQ ID NO: 689); 3CDA 86 (SEQ ID NO: 690); 3CDA 88 (SEQ ID NO: 691); or 3CDA 90 (SEQ ID NO: 692).

[0474] In some embodiments, the CD8 targeting moiety comprises an amino acid sequence selected from SEQ ID NOs: 624-692 (provided above) without the terminal histidine tag sequence (i.e., HHHHHH; SEQ ID NO: 393).

[0475] In some embodiments, the CD8 targeting moiety comprises an amino acid sequence selected from SEQ ID NOs: 621-692 (provided above) without the HA tag (i.e., YPYDVPDYGS; SEQ ID NO: 394).

[0476] In some embodiments, the CD8 targeting moiety comprises an amino acid sequence selected from SEQ ID NOs: 621-692 (provided above) without the AAA linker (i.e., MA).

[0477] In some embodiments, the CD8 targeting moiety comprises an amino acid sequence selected from SEQ ID NOs: 621-623 (provided above) without the AAA linker and HA tag.

[0478] In some embodiments, the CD8 targeting moiety comprises an amino acid sequence selected from SEQ ID NOs: 624-692 (provided above) without the AAA linker, HA tag, and terminal histidine tag sequence (i.e., AAAYPYDVPDYGSHHHHHH; SEQ ID NO: 395).

[0479] In some embodiments, the CD8 targeting moiety comprises an amino acid sequence described in US Patent Publication No. 2014/0271462, the entire contents of which are incorporated by reference. In various embodiments, the CD8 binding agent comprises an amino acid sequence described in Table 0.1, Table 0.2, Table 0.3, and/or FIGS. 1A-12I of US Patent Publication No. 2014/0271462, the entire contents of which are incorporated by reference. In various embodiments, the CD8 binding agent comprises a HCDR1 of SEQ ID NO: 693 or 694 and/or a HCDR2 of SEQ ID NO: 693 or 694 and/or a HCDR3 of SEQ ID NO: 693 or 694 and/or a LCDR1 of SEQ ID NO: 695 and/or a LCDR2 of SEQ ID NO: 695 and/or a LCDR3 of SEQ ID NO: 695.

[0480] In some embodiments, the present technology contemplates the use of any natural or synthetic analogs, mutants, variants, alleles, homologs and orthologs (herein collectively referred to as “analogs”) of the CD8 targeting moiety described herein. In some embodiments, the amino acid sequence of the CD8 targeting moiety further includes an amino acid analog, an amino acid derivative, or other non-classical amino acids.

[0481] In some embodiments, the CD8 targeting moiety comprises a targeting moiety comprising a sequence that is at least 60% identical to any one of the CD8 sequences disclosed herein. For example, the CD8 targeting moiety may comprise a targeting moiety comprising a sequence that is at least about 60%, at least about 61%, at least about 62%, at least about 63%, at least about 64%, at least about 65%, at least about 66%, at least about 67%, at least about 68%, at least about 69%, at least about 70%, at least about 71%, at least about 72%, at least about 73%, at least about 74%, at least about 75%, at least about 76%, at least about 77%, at least about 78%, at least about 79%, at least about 80%, at least about 81%, at least about 82%, at least about 83%, at least about 84%, at least about 85%, at least about 86%, at least about 87%, at least about 88%, at least about 89%, at least about 90%, at least about 91%, at least about 92%, at least about 93%, at least about 94%, at least about 95%, at least about 96%, at least about 97%, at least about 98%, at least about 99%, or 100% identical to any one of the CD8 sequences disclosed herein (e.g. about 60%, or about 61%, or about 62%, or about 63%, or about 64%, or about 65%, or about 66%, or about 67%, or about 68%, or about 69%, or about 70%, or about 71%, or about 72%, or about 73%, or about 74%, or about 75%, or about 76%, or about 77%, or about 78%, or about 79%, or about 80%, or about 81%, or about 82%, or about 83%, or about 84%, or about 85%, or about 86%, or about 87%, or about 88%, or about 89%, or about 90%, or about 91%, or about 92%, or about 93%, or about 94%, or about 95%, or about 96%, or about 97%, or about 98%, about 99% or about 100% sequence identity to any one of the CD8 sequences disclosed herein).

[0482] In various embodiments, the CD8 targeting moiety comprises an amino acid sequence having one or more amino acid mutations with respect to any one of the CD8 sequences disclosed herein. In various embodiments, the CD8 binding agent comprises a targeting moiety comprising an amino acid sequence having one, or two, or three, or four, or five, or six, or seen, or eight, or nine, or ten, or fifteen, or twenty amino acid mutations with respect to any one of the CD8 sequences disclosed herein. In some embodiments, the one or more amino acid mutations may be independently selected from substitutions, insertions, deletions, and truncations.

[0483] In some embodiments, the amino acid mutations are amino acid substitutions, and may include conservative and/or non-conservative substitutions.

[0484] “Conservative substitutions” may be made, for instance, on the basis of similarity in polarity, charge, size, solubility, hydrophobicity, hydrophilicity, and/or the amphipathic nature of the amino acid residues involved. The 20 naturally occurring amino acids can be grouped into the following six standard amino acid groups: (1) hydrophobic: Met, Ala, Val, Leu, Ile; (2) neutral hydrophilic: Cys, Ser, Thr; Asn, Gln; (3) acidic: Asp, Glu; (4) basic: His, Lys, Arg; (5) residues that influence chain orientation: Gly, Pro; and (6) aromatic: Trp, Tyr, Phe.

[0485] As used herein, “conservative substitutions” are defined as exchanges of an amino acid by another amino acid listed within the same group of the six standard amino acid groups shown above. For example, the exchange of Asp by Glu retains one negative charge in the so modified polypeptide. In addition, glycine and proline may be substituted for one another based on their ability to disrupt α-helices.

[0486] As used herein, “non-conservative substitutions” are defined as exchanges of an amino acid by another amino acid listed in a different group of the six standard amino acid groups (1) to (6) shown above.

[0487] In various embodiments, the substitutions may also include non-classical amino acids (e.g. selenocysteine, pyrrolysine, N-formylmethionine β-alanine, GABA and δ-Aminolevulinic acid, 4-aminobenzoic acid (PABA), D-isomers of the common amino acids, 2,4-diaminobutyric acid, α-amino isobutyric acid, 4-aminobutyric acid, Abu, 2-amino butyric acid, γ-Abu, ε-Ahx, 6-amino hexanoic acid, Aib, 2-amino isobutyric acid, 3-amino propionic acid, ornithine, norleucine, norvaline, hydroxyproline, sarcosme, citrulline, homocitrulline, cysteic acid, t-butylglycine, t-butylalanine, phenylglycine, cyclohexylalanine, β-alanine, fluoro-amino acids, designer amino acids such as β methyl amino acids, C α-methyl amino acids, N α-methyl amino acids, and amino acid analogs in general).

[0488] In various embodiments, the amino acid mutation may be in the CDRs of the targeting moiety (e.g., the CDR1, CDR2 or CDR3 regions). In another embodiment, amino acid alteration may be in the framework regions (FRs) of the targeting moiety (e.g., the FR1, FR2, FR3, or FR4 regions).

[0489] Modification of the amino acid sequences may be achieved using any known technique in the art e.g., site-directed mutagenesis or PCR based mutagenesis. Such techniques are described, for example, in Sambrook et al., Molecular Cloning: A Laboratory Manual, Cold Spring Harbor Press, Plainview, N.Y., 1989 and Ausubel et al., Current Protocols in Molecular Biology, John Wiley & Sons, New York, N.Y., 1989.

[0490] In various embodiments, the mutations do not substantially reduce the CD8 targeting moiety's capability to specifically bind to CD8. In various embodiments, the mutations do not substantially reduce the CD8 targeting moiety's capability to specifically bind to CD8 without functionally modulating CD8.

[0491] In various embodiments, the binding affinity of the CD8 targeting moiety for the full-length and/or mature forms and/or isoforms and/or splice variants and/or fragments and/or any other naturally occurring or synthetic analogs, variants, or mutants (including monomeric, dimeric, heterodimeric, multimeric and/or associated forms) of human CD8 α and/or β chains may be described by the equilibrium dissociation constant (K_{D}). In various embodiments, the CD8 targeting moiety binds to the full-length and/or mature forms and/or isoforms and/or splice variants and/or fragments and/or any other naturally occurring or synthetic analogs, variants, or mutants (including monomeric, dimeric, heterodimeric, multimeric and/or associated forms) of human CD8 α and/or β chains with a K_{D} of less than about 1 uM, about 900 nM, about 800 nM, about 700 nM, about 600 nM, about 500 nM, about 400 nM, about 300 nM, about 200 nM, about 100 nM, about 90 nM, about 80 nM, about 70 nM, about 60 nM, about 50 nM, about 40 nM, about 30 nM, about 20 nM, about 10 nM, or about 5 nM, or about 1 nM.

[0492] In various embodiments, the CD8 targeting moiety binds but does not functionally modulate the antigen of interest, i.e., CD8. For instance, in various embodiments, the CD8 targeting moiety simply targets the antigen but does not substantially functionally modulate the antigen, e.g. it does not substantially inhibit, reduce or neutralize a biological effect that the antigen has. In various embodiments, the CD8 targeting moiety binds an epitope that is physically separate from an antigen site that is important for its biological activity (e.g. an antigen's active site).

[0493] Such non-functionally modulating (e.g. non-neutralizing) binding finds use in various embodiments of the present invention, including methods in which the CD8 targeting moiety is used to directly or indirectly recruit active immune cells to a site of need via an effector antigen. For example, in various embodiments, the CD8 targeting moiety may be used to directly or indirectly recruit cytotoxic T cells via CD8 to a tumor cell in a method of reducing or eliminating a tumor (e.g. the CD8 binding agent may comprise a targeting moiety having an anti-CD8 antigen recognition domain and a targeting moiety having a recognition domain (e.g. an antigen recognition domain) directed against a tumor antigen or receptor). In such embodiments, it is desirable to directly or indirectly recruit CD8-expressing cytotoxic T cells but not to neutralize the CD8 activity. In these embodiments, CD8 signaling is an important piece of the tumor reducing or eliminating effect.

### PD-1, PD-L1, or PD-L2 Targeting Moieties

[0494] In some embodiments, the targeting moiety is a PD-1, PD-L1, or PD-L2 targeting moiety that is a protein-based agent capable of specific binding to PD-1, PD-L1, or PD-L2. In some embodiments, the PD-1, PD-L1, or PD-L2 targeting moiety binds but does not functionally modulate (e.g., partially or fully neutralize) the antigen of interest, i.e., PD-1, PD-L1, or PD-L2. For instance, in various embodiments, the PD-1, PD-L1, or PD-L2 targeting moiety simply targets the antigen but does not substantially functionally modulate (e.g. partially or fully inhibit, reduce or neutralize) a biological effect that the antigen has. In various embodiments, the PD-1, PD-L1, or PD-L2 targeting moiety binds an epitope that is physically separate from an antigen site that is important for its biological activity (e.g. an antigen's active site).

[0495] PD-1 Targeting Moieties Programmed cell death protein 1, also known as PD-1 and cluster of differentiation 279 (CD279), is a cell surface receptor that is primarily expressed on activated T cells, B cells, and macrophages. PD-1 has been shown to negatively regulate antigen receptor signaling upon engagement of its ligands (i.e., PD-L1 and/or PD-L2). PD-1 plays an important role in down-regulating the immune system and promoting self tolerance by suppressing T cell inflammatory activity. PD-1 is a type I transmembrane glycoprotein containing an Ig Variable-type (V-type) domain responsible for ligand binding and a cytoplasmic tail that is responsible for the binding of signaling molecules. The cytoplasmic tail of PD-1 contains two tyrosine-based signaling motifs, an ITIM (immunoreceptor tyrosine-based inhibition motif) and an ITSM (immunoreceptor tyrosine-based switch motif).

[0496] In some embodiments, the PD-1 targeting moiety comprises an antigen recognition domain that recognizes an epitope present on PD-1. In an embodiment, the antigen-recognition domain recognizes one or more linear epitopes present on PD-1. In some embodiments, a linear epitope refers to any continuous sequence of amino acids present on PD-1. In another embodiment, the antigen-recognition domain recognizes one or more conformational epitopes present on PD-1. As used herein, a conformation epitope refers to one or more sections of amino acids (which may be discontinuous) which form a three-dimensional surface with features and/or shapes and/or tertiary structures capable of being recognized by an antigen recognition domain.

[0497] In some embodiments, the PD-1 targeting moiety may bind to the full-length and/or mature forms and/or isoforms and/or splice variants and/or fragments and/or any other naturally occurring or synthetic analogs, variants, or mutants of human PD-1. In various embodiments, the PD-1 targeting moiety may bind to any forms of the human PD-1. In an embodiment, the PD-1 targeting moiety binds to a phosphorylated form of PD-1.

[0498] In an embodiment, the PD-1 targeting moiety comprises an antigen recognition domain that recognizes one or more epitopes present on human PD-1. In an embodiment, the human PD-1 comprises the amino acid sequence of (signal peptide underlined):

(SEQ ID NO: 696)
MQIPQAPWPVVWAVLQLGWRPGWFLDSPDRPWNPPTFSPALLVVTEGD
NATFTCSFSNTSESFVLNWYRMSPSNQTDKLAAFPEDRSQPGQDCRFR
VTQLPNGRDFHMSVVRARRNDSGTYLCGAISLAPKAQIKESLRAELRV
TERRAEVPTAHPSPSPRPAGQFQTLVVGVVGGLLGSLVLLVWVLAVIC
SRAARGTIGARRTGQPLKEDPSAVPVFSVDYGELDFQWREKTPEPPVP
CVPEQTEYATIVFPSGMGTSSPARRGSADGPRSAQPLRPEDGHCSWPL.

[0499] In another embodiment, the human PD-1 comprises the amino acid sequence of SEQ ID NO: 696 without the amino-terminal signal peptide.

[0500] In some embodiments, the PD-1 targeting moiety is capable of specific binding. In various embodiments, the PD-1 targeting moiety comprises an antigen recognition domain such as an antibody or derivatives thereof.

[0501] In some embodiments, the PD-1 targeting moiety comprises an antibody derivative or format. In some embodiments, the PD-1 targeting moiety comprises a single-domain antibody, a recombinant heavy-chain-only antibody (VHH), a single-chain antibody (scFv), a shark heavy-chain-only antibody (VNAR), a microprotein (cysteine knot protein, knottin), a DARPin; a Tetranectin; an Affibody; a Transbody; an Anticalin; an AdNectin; an Affilin; an alphabody; a bicyclic peptide; an Affimer, a Microbody; an aptamer; an alterase; a plastic antibody; a phylomer; a stradobody; a maxibody; an evibody; a fynomer, an armadillo repeat protein, a Kunitz domain, an avimer, an atrimer, a probody, an immunobody, a triomab, a troybody; a pepbody; a vaccibody, a UniBody; a DuoBody, a Fv, a Fab, a Fab′, a F(ab′)₂, a peptide mimetic molecule, or a small (e.g. synthetic or natural) molecule, e.g. without limitation, as described in Patent Publication Nos. or U.S. Pat. No. 7,417,130, US 2004/132094, U.S. Pat. No. 5,831,012, US 2004/023334, U.S. Pat. Nos. 7,250,297, 6,818,418, US 2004/209243, U.S. Pat. Nos. 7,838,629, 7,186,524, 6,004,746, 5,475,096, US 2004/146938, US 2004/157209, U.S. Pat. Nos. 6,994,982, 6,794,144, US 2010/239633, U.S. Pat. No. 7,803,907, US 2010/119446, and/or U.S. Pat. No. 7,166,697, the contents of which are hereby incorporated by reference in their entireties. See also, Storz MAbs. 2011 May-June; 3(3): 310-317.

[0502] In some embodiments, the PD-1 targeting moiety comprises a single-domain antibody, such as a VHH. The VHH may be derived from, for example, an organism that produces VHH antibody such as a camelid, a shark, or the VHH may be a designed VHH. VHHs are antibody-derived therapeutic proteins that contain the unique structural and functional properties of naturally-occurring heavy-chain antibodies. VHH technology is based on fully functional antibodies from camelids that lack light chains. These heavy-chain antibodies contain a single variable domain (V_{H}H) and two constant domains (CH2 and CH3).

[0503] In an embodiment, the PD-1 targeting moiety comprises a VHH. In some embodiments, the VHH is a humanized VHH or camelized VHH.

[0504] In some embodiments, the VHH comprises a fully human VH domain, e.g. a HUMABODY (Crescendo Biologics, Cambridge, UK). In some embodiments, fully human VH domain, e.g. a HUMABODY is monovalent, bivalent, or trivalent. In some embodiments, the fully human VH domain, e.g. a HUMABODY is mono- or multi-specific such as monospecific, bispecific, or trispecific. Illustrative fully human VH domains, e.g. HUMABODIES are described in, for example, WO2016/113555 and WO2016/113557, the entire disclosure of which is incorporated by reference.

[0505] In some embodiments, the PD-1 targeting moiety comprises a VHH comprising a single amino acid chain having four “framework regions” or FRs and three “complementary determining regions” or CDRs. As used herein, “framework region” or “FR” refers to a region in the variable domain which is located between the CDRs. As used herein, “complementary determining region” or “CDR” refers to variable regions in VHHs that contains the amino acid sequences capable of specifically binding to antigenic targets.

[0506] In various embodiments, the PD-1 targeting moiety comprises a VHH having a variable domain comprising at least one CDR1, CDR2, and/or CDR3 sequences. In various embodiments, the PD-1 binding agent comprises a VHH having a variable region comprising at least one FR1, FR2, FR3, and FR4 sequences.

[0507] In some embodiments, the CDR1 sequence is selected from SEQ ID Nos.: 697-710.

[0508] In some embodiments, the CDR2 sequence is selected from SEQ ID Nos.: 711-724.

[0509] In some embodiments, the CDR3 sequence is selected from SEQ ID Nos.: 725-738.

[0510] In various exemplary embodiments, the PD-1 targeting moiety comprises an amino acid sequence selected from the following sequences:

[0511] 2PD23 (SEQ ID NO: 739); 2PD26 (SEQ ID NO: 740); 2PD90 (SEQ ID NO: 741); 2PD-106 (SEQ ID NO: 742); 2PD-16 (SEQ ID NO: 743); 2PD71 (SEQ ID NO: 744); 2PD-152 (SEQ ID NO: 745); 2PD-12 (SEQ ID NO: 746); 3PD55 (SEQ ID NO: 747); 3PD82 (SEQ ID NO: 748); 2PD8 (SEQ ID NO: 749); 2PD27 (SEQ ID NO: 750); 2PD82 (SEQ ID NO: 751); or 3PD36 (SEQ ID NO: 752).

[0512] In some embodiments, the PD-1 targeting moiety comprises an amino acid sequence selected from SEQ ID NOs: 739-752 (provided above) without the terminal histidine tag sequence (i.e., HHHHHH; SEQ ID NO: 393).

[0513] In some embodiments, the PD-1 targeting moiety comprises an amino acid sequence selected from SEQ ID NOs: 739-752 (provided above) without the HA tag (i.e., YPYDVPDYGS; SEQ ID NO: 394).

[0514] In some embodiments, the PD-1 targeting moiety comprises an amino acid sequence selected from SEQ ID NOs: 739-752 (provided above) without the AAA linker (i.e., MA).

[0515] In some embodiments, the PD-1 targeting moiety comprises an amino acid sequence selected from SEQ ID NOs: 739-752 (provided above) without the AAA linker, HA tag, and terminal histidine tag sequence (i.e., AAAYPYDVPDYGSHHHHHH; SEQ ID NO: 395).

[0516] In some embodiments, the present technology contemplates the use of any natural or synthetic analogs, mutants, variants, alleles, homologs and orthologs (herein collectively referred to as “analogs”) of the PD-1 targeting moiety described herein. In some embodiments, the amino acid sequence of the PD1 targeting moiety further includes an amino acid analog, an amino acid derivative, or other non-classical amino acids.

[0517] In some embodiments, the PD-1 targeting moiety comprises the anti-PD-1 antibody pembrolizumab (aka MK-3475, KEYTRUDA), or fragments thereof. Pembrolizumab and other humanized anti-PD-1 antibodies are disclosed in Hamid, et al. (2013) New England Journal of Medicine 369 (2): 134-44, U.S. Pat. No. 8,354,509, and WO 2009/114335, the entire disclosures of which are hereby incorporated by reference. In illustrative embodiments, pembrolizumab or an antigen-binding fragment thereof for use in the methods provided herein comprises a heavy chain comprising the amino acid sequence of SEQ ID NO: 753; and/or a light chain comprising the amino acid sequence of (SEQ ID NO: 754).

[0518] In an embodiment, the PD-1 targeting moiety comprises the anti-PD-1 antibody, nivolumab (aka BMS-936558, MDX-1106, ONO-4538, OPDIVO), or fragments thereof. Nivolumab (clone 5C4) and other human monoclonal antibodies that specifically bind to PD-1 are disclosed in U.S. Pat. No. 8,008,449 and WO 2006/121168, the entire disclosures of which are hereby incorporated by reference. In illustrative embodiments, nivolumab or an antigen-binding fragment thereof comprises a heavy chain comprising the amino acid sequence of SEQ ID NO: 755; and/or a light chain comprising the amino acid sequence of (SEQ ID NO: 756).

[0519] In an embodiment, the PD-1 targeting moiety comprises the anti-PD-1 antibody pidilizumab (aka CT-011, hBAT or hBAT-1), or fragments thereof. Pidilizumab and other humanized anti-PD-I monoclonal antibodies are disclosed in US 2008/0025980 and WO 2009/101611, the entire disclosures of which are hereby incorporated by reference. In illustrative embodiments, the anti-PD-1 antibody or an antigen-binding fragment thereof for use in the methods provided herein comprises a light chain variable regions comprising an amino acid sequence selected from SEQ ID NOS: 15-18 of US 2008/0025980 (SEQ ID Nos: 757-760 of this application); and/or a heavy chain comprising an amino acid sequence selected from SEQ ID NOS: 20-24 of US 2008/0025980 (SEQ ID Nos: 761-765 of this application).

[0520] In an embodiment, the targeting moiety comprises a light chain comprising SEQ ID NO: 18 of US 2008/0025980 (SEQ ID NO: 760) and a heavy chain comprising SEQ ID NO: 22 of US 2008/0025980 (SEQ ID NO: 763).

[0521] In an embodiment, the PD-1 targeting moiety comprises AMP-514 (aka MEDI-0680).

[0522] In an embodiment, the PD-1 targeting moiety comprises the PD-L2-Fc fusion protein AMP-224, which is disclosed in WO2010/027827 and WO 2011/066342, the entire disclosures of which are hereby incorporated by reference.

[0523] In such an embodiment, the targeting moiety may include a targeting domain which comprises SEQ ID NO: 4 of WO2010/027827 (SEQ ID NO: 766 of this application) and/or the B7-DC fusion protein which comprises SEQ ID NO:83 of WO2010/027827 (SEQ ID NO: 767 of this application).

[0524] In an embodiment, the PD-1 targeting moiety comprises the peptide AUNP 12 or any of the other peptides disclosed in US 2011/0318373 or U.S. Pat. No. 8,907,053. For example, the targeting moiety may comprise AUNP 12 (i.e., Compound 8 or SEQ ID NO:49 of US 2011/0318373) which has the sequence of:

[chemical structure]

[0525] In an embodiment, the PD-1 targeting moiety comprises the anti-PD-1 antibody 1E3, or fragments thereof, as disclosed in US 2014/0044738, the entire disclosures of which are hereby incorporated by reference. In illustrative embodiments, 1E3 or an antigen-binding fragment thereof for use in the methods provided herein comprises a heavy chain variable region comprising the amino acid sequence of SEQ ID NO: 768; and/or a light chain variable region comprising the amino acid sequence of SEQ ID NO: 769.

[0526] In an embodiment, the PD-1 targeting moiety comprises the anti-PD-1 antibody 1E8, or fragments thereof, as disclosed in US 2014/0044738, the entire disclosures of which are hereby incorporated by reference. In illustrative embodiments, 1E8 or an antigen-binding fragment thereof for use in the methods provided herein comprises a heavy chain variable region comprising the amino acid sequence of SEQ ID NO: 770; and/or a light chain variable region comprising the amino acid sequence of SEQ ID NO: 771.

[0527] In an embodiment, the PD-1 targeting moiety comprises the anti-PD-1 antibody 1H3, or fragments thereof, as disclosed in US 2014/0044738, the entire disclosures of which are hereby incorporated by reference. In illustrative embodiments, 1H3 or an antigen-binding fragment thereof for use in the methods provided herein comprises a heavy chain variable region comprising the amino acid sequence of SEQ ID NO: 772; and/or light chain variable region comprising the amino acid sequence of SEQ ID NO: 773.

[0528] In an embodiment, the PD-1 targeting moiety comprises a VHH directed against PD-1 as disclosed, for example, in U.S. Pat. No. 8,907,065 and WO 2008/071447, the entire disclosures of which are hereby incorporated by reference. In illustrative embodiments, the VHHs against PD-1 comprise SEQ ID NOS: 347-351 of U.S. Pat. No. 8,907,065 (SEQ ID Nos: 774-778).

[0529] In an embodiment, the PD-1 targeting moiety comprises any one of the anti-PD-1 antibodies, or fragments thereof, as disclosed in US2011/0271358 and WO2010/036959, the entire contents of which are hereby incorporated by reference. In illustrative embodiments, the antibody or an antigen-binding fragment thereof for use in the methods provided herein comprises a heavy chain comprising an amino acid sequence selected from SEQ ID NOS: 25-29 of US2011/0271358 (SEQ ID Nos: 779-783 of this application); and/or a light chain comprising an amino acid sequence selected from SEQ ID NOS: 30-33 of US2011/0271358 (SEQ ID Nos: 784-787 of this application).

[0530] In some embodiments, the PD-1 targeting moiety is an antibody directed against PD-1, or an antibody fragment thereof, selected from TSR-042 (Tesaro, Inc.), REGN2810 (Regeneron Pharmaceuticals, Inc.), PDR001 (Novartis Pharmaceuticals), and BGB-A317 (BeiGene Ltd.)

[0531] In one embodiment, the targeting moiety binds to PD-1 and the signaling moiety is a wild type IFNα or a modified IFNα. In some embodiments, the Fc chimeric protein is in one of the configurations shown in FIGS. 4A to 4D, where the targeting moiety binds to PD-1 and the signaling moiety is a wild type IFNα. In some embodiments, the targeting moiety binds to PD-1 (e.g., scFv) and the signaling moiety is a wild type IFNα2.

[0532] PD-L1 Targeting Moieties

[0533] In some embodiments, the targeting moiety is a PD-L1 targeting moiety. Programmed death-ligand 1 (PD-L1) also known as cluster of differentiation 274 (CD274) or B7 homolog 1 (B7-H1) is a type 1 transmembrane protein that has been speculated to play a major role in suppressing the immune system. PD-L1 is upregulated on macrophages and dendritic cells (DC) in response to LPS and GM-CSF treatment, and on T cells and B cells upon TCR and B cell receptor signaling.

[0534] In various embodiments, the PD-L1 targeting moiety comprises an antigen recognition domain that recognizes an epitope present on PD-L1. In an embodiment, the antigen-recognition domain recognizes one or more linear epitopes present on PD-L1. In some embodiment, a linear epitope refers to any continuous sequence of amino acids present on PD-L1. In another embodiment, the antigen-recognition domain recognizes one or more conformational epitopes present on PD-L1. As used herein, a conformation epitope refers to one or more sections of amino acids (which may be discontinuous) which form a three-dimensional surface with features and/or shapes and/or tertiary structures capable of being recognized by an antigen recognition domain.

[0535] In various embodiments, the PD-L1 targeting moiety may bind to the full-length and/or mature forms and/or isoforms and/or splice variants and/or fragments and/or any other naturally occurring or synthetic analogs, variants, or mutants of human PD-L1. In various embodiments, the PD-L1 targeting moiety may bind to any forms of the human PD-L1. In an embodiment, the PD-L1 targeting moiety binds to a phosphorylated form of PD-L1. In an embodiment, the PD-L1 targeting moiety binds to an acetylated form of PD-L1.

[0536] In an embodiment, the PD-L1 targeting moiety comprises an antigen recognition domain that recognizes one or more epitopes present on human PD-L1. In an embodiment, the human PD-L1 comprises the amino acid sequence of (signal peptide underlined):

Isoform 1:
(SEQ ID NO: 788)
MRIFAVFIFMTYWHLLNAFTVTVPKDLYWEYGSNMTIECKFPVEKQLDLA
ALIVYWEMEDKNIIQFVHGEEDLKVQHSSYRQRARLLKDQLSLGNAALQI
TDVKLQDAGVYRCMISYGGADYKRITVKVNAPYNKINQRILVVDPVTSEH
ELTCQAEGYPKAEVIWTSSDHQVLSGKTTTTNSKREEKLFNVTSTLRINT
TTNEIFYCTFRRLDPEENHTAELVIPELPLAHPPNERTHLVILGAILLCL
GVALTFIFRLRKGRMMDVKKCGIQDTNSKKQSDTHLEET;
Isoform 2:
(SEQ ID NO: 789)
MRIFAVFIFMTYWHLLNAPYNKINQRILVVDPVTSEHELTCQAEGYPKAE
VIWTSSDHQVLSGKTTTTNSKREEKLFNVTSTLRINTTTNEIFYCTFRRL
DPEENHTAELVIPELPLAHPPNERTHLVILGAILLCLGVALTFIFRLRKG
RMMDVKKCGIQDTNSKKQSDTHLEET; or
Isoform 3:
(SEQ ID NO: 790)
MRIFAVFIFMTYWHLLNAFTVTVPKDLYWEYGSNMTIECKFPVEKQLDLA
ALIVYWEMEDKNIIQFVHGEEDLKVQHSSYRQRARLLKDQLSLGNAALQI
TDVKLQDAGVYRCMISYGGADYKRITVKVNAPYNKINQRILVVDPVTSEH
ELTCQAEGYPKAEVIWTSSDHQVLSGD.

[0537] In various embodiments, the PD-L1 targeting moiety is capable of specific binding. In various embodiments, the PD-L1 targeting moiety comprises an antigen recognition domain such as an antibody or derivatives thereof. In an embodiment, the PD-L1 targeting moiety comprises an antibody.

[0538] In some embodiments, the PD-L1 targeting moiety comprises an antibody derivative or format. In some embodiments, the PD-L1 targeting moiety comprises a single-domain antibody, a recombinant heavy-chain-only antibody (VHH), a single-chain antibody (scFv), a shark heavy-chain-only antibody (VNAR), a microprotein (cysteine knot protein, knottin), a DARPin; a Tetranectin; an Affibody; a Transbody; an Anticalin; an AdNectin; an alphabody; a bicyclic peptide; an Affilin; an Affimer, a Microbody; an aptamer; an alterase; a plastic antibody; a phylomer; a stradobody; a maxibody; an evibody; a fynomer, an armadillo repeat protein, a Kunitz domain, an avimer, an atrimer, a probody, an immunobody, a triomab, a troybody; a pepbody; a vaccibody, a UniBody; a DuoBody, a Fv, a Fab, a Fab′, a F(ab′)2, a peptide mimetic molecule, or a small (e.g. synthetic or natural) molecule, e.g. without limitation, as described in Patent Publication Nos. or U.S. Pat. No. 7,417,130, US 2004/132094, U.S. Pat. No. 5,831,012, US 2004/023334, U.S. Pat. Nos. 7,250,297, 6,818,418, US 2004/209243, U.S. Pat. Nos. 7,838,629, 7,186,524, 6,004,746, 5,475,096, US 2004/146938, US 2004/157209, U.S. Pat. Nos. 6,994,982, 6,794,144, US 2010/239633, U.S. Pat. No. 7,803,907, US 2010/119446, and/or U.S. Pat. No. 7,166,697, the contents of which are hereby incorporated by reference in their entireties. See also, Storz MAbs. 2011 May-June; 3(3): 310-317.

[0539] In some embodiments, the PD-L1 targeting moiety comprises a single-domain antibody, such as a VHH. The VHH may be derived from, for example, an organism that produces VHH antibody such as a camelid, a shark, or the VHH may be a designed VHH. VHHs are antibody-derived therapeutic proteins that contain the unique structural and functional properties of naturally-occurring heavy-chain antibodies. VHH technology is based on fully functional antibodies from camelids that lack light chains. These heavy-chain antibodies contain a single variable domain (V_{H}H) and two constant domains (CH2 and CH3).

[0540] In an embodiment, the PD-L1 targeting moiety comprises a VHH. In some embodiments, the VHH is a humanized VHH or camelized VHH.

[0541] In some embodiments, the VHH comprises a fully human VH domain, e.g. a HUMABODY (Crescendo Biologics, Cambridge, UK). In some embodiments, fully human VH domain, e.g. a HUMABODY is monovalent, bivalent, or trivalent. In some embodiments, the fully human VH domain, e.g. a HUMABODY is mono- or multi-specific such as monospecific, bispecific, or trispecific. Illustrative fully human VH domains, e.g. HUMABODIES are described in, for example, WO2016/113555 and WO2016/113557, the entire disclosure of which is incorporated by reference.

[0542] In some embodiments, the PD-L1 targeting moiety comprises a VHH comprising a single amino acid chain having four “framework regions” or FRs and three “complementary determining regions” or CDRs. As used herein, “framework region” or “FR” refers to a region in the variable domain which is located between the CDRs. As used herein, “complementary determining region” or “CDR” refers to variable regions in VHHs that contains the amino acid sequences capable of specifically binding to antigenic targets.

[0543] In various embodiments, the PD-L1 targeting moiety comprises a VHH having a variable domain comprising at least one CDR1, CDR2, and/or CDR3 sequences. In various embodiments, the PD-L1 targeting moiety comprises a VHH having a variable region comprising at least one FR1, FR2, FR3, and FR4 sequences.

[0544] In some embodiments, the CDR1 sequence is selected from SEQ ID Nos.: 791-821.

[0545] In some embodiments, the CDR2 sequence is selected from SEQ ID Nos.: 822-852.

[0546] In some embodiments, the CDR3 sequence is selected from SEQ ID Nos.: 853-883.

[0547] In various exemplary embodiments, the PD-L1 targeting moiety comprises an amino acid sequence selected from the following sequences: 2LIG2 (SEQ ID NO: 884); 2LIG3 (SEQ ID NO: 885); 2LIG16 (SEQ ID NO: 886); 2LIG22 (SEQ ID NO: 887); 2LIG27 (SEQ ID NO: 888); 2LIG29 (SEQ ID NO: 889); 2LIG30 (SEQ ID NO: 890); 2LIG34 (SEQ ID NO: 891); 2LIG35 (SEQ ID NO: 892); 2LIG48 (SEQ ID NO: 893); 2LIG65 (SEQ ID NO: 894); 2LIG85 (SEQ ID NO: 895); 2LIG86 (SEQ ID NO: 896); 2LIG89 (SEQ ID NO: 897); 2LIG97 (SEQ ID NO: 898); 2LIG99 (SEQ ID NO: 899); 2LIG109 (SEQ ID NO: 900); 2LIG127 (SEQ ID NO: 901); 2LIG139 (SEQ ID NO: 902); 2LIG176 (SEQ ID NO: 903); 2LIG189 (SEQ ID NO: 904); 3LIG3 (SEQ ID NO: 905); 3LIG7 (SEQ ID NO: 906); 3LIG8 (SEQ ID NO: 907); 3LIG9 (SEQ ID NO: 908); 3LIG18 (SEQ ID NO: 909); 3LIG20 (SEQ ID NO: 910); 3LIG28 (SEQ ID NO: 911); 3LIG29 (SEQ ID NO: 912); 3LIG30 (SEQ ID NO: 913); or 3LIG33 (SEQ ID NO: 914).

[0548] In some embodiments, the PD-L1 targeting moiety comprises an amino acid sequence selected from SEQ ID NOs: 884-914 (provided above) without the terminal histidine tag sequence (i.e., HHHHHH; SEQ ID NO: 393).

[0549] In some embodiments, the PD-L1 targeting moiety comprises an amino acid sequence selected from SEQ ID NOs: 884-914 (provided above) without the HA tag (i.e., YPYDVPDYGS; SEQ ID NO: 394).

[0550] In some embodiments, the PD-L1 targeting moiety comprises an amino acid sequence selected from SEQ ID NOs: 884-914 (provided above) without the AAA linker (i.e., MA).

[0551] In some embodiments, the PD-L1 targeting moiety comprises an amino acid sequence selected from SEQ ID NOs: 884-914 (provided above) without the AAA linker, HA tag, and terminal histidine tag sequence (i.e., AAAYPYDVPDYGSHHHHHH; SEQ ID NO: 395).

[0552] In an embodiment, the PD-L1 targeting moiety comprises the anti-PD-L1 antibody MED14736 (aka durvalumab), or fragments thereof. MED14736 is selective for PD-L1 and blocks the binding of PD-L1 to the PD-1 and CD80 receptors. MED14736 and antigen-binding fragments thereof for use in the methods provided herein comprises a heavy chain and a light chain or a heavy chain variable region and a light chain variable region. The sequence of MED14736 is disclosed in WO/2016/06272, the entire contents of which are hereby incorporated by reference. In illustrative embodiments, MED14736 or an antigen-binding fragment thereof for use in the methods provided herein comprises a heavy chain comprising the amino acid sequence of SEQ ID NO: 915; and/or a light chain comprising the amino acid sequence of SEQ ID NO: 916.

[0553] In illustrative embodiments, the MED14736 or an antigen-binding fragment thereof for use in the methods provided herein comprises a heavy chain variable region comprising the amino acid sequence of SEQ ID NO: 4 of WO/2016/06272 (SEQ ID NO: 917); and/or a light chain variable region comprising the amino acid sequence of SEQ ID NO: 3 of WO/2016/06272 (SEQ ID NO: 918).

[0554] In an embodiment, the PD-L1 targeting moiety comprises the anti-PD-L1 antibody atezolizumab (aka MPDL3280A, RG7446), or fragments thereof. In illustrative embodiments, atezolizumab or an antigen-binding fragment thereof for use in the methods provided herein comprises a heavy chain comprising the amino acid sequence of SEQ ID NO: 919; and/or a light chain comprising the amino acid sequence of SEQ ID NO: 920.

[0555] In an embodiment, the PD-L1 targeting moiety comprises the anti-PD-L1 antibody avelumab (aka MSB0010718C), or fragments thereof. In illustrative embodiments, avelumab or an antigen-binding fragment thereof for use in the methods provided herein comprises a heavy chain comprising the amino acid sequence of SEQ ID NO: 921; and/or a light chain comprising the amino acid sequence of SEQ ID NO: 922.

[0556] In an embodiment, the PD-L1 targeting moiety comprises the anti-PD-L1 antibody BMS-936559 (aka 12A4, MDX-1105), or fragments thereof, as disclosed in US 2013/0309250 and WO2007/005874, the entire disclosures of which are hereby incorporated by reference. In illustrative embodiments, BMS-936559 or an antigen-binding fragment thereof for use in the methods provided herein comprises a heavy chain variable region comprising the amino acid sequence of SEQ ID NO: 923; and/or a light chain variable region comprising the amino acid sequence of SEQ ID NO: 924.

[0557] In an embodiment, the PD-L1 targeting moiety comprises the anti-PD-L1 antibody 3G10, or fragments thereof, as disclosed in US 2013/0309250 and WO2007/005874, the entire disclosures of which are hereby incorporated by reference. In illustrative embodiments, 3G10 or an antigen-binding fragment thereof for use in the methods provided herein comprises a heavy chain variable region comprising the amino acid sequence of SEQ ID NO: 925; and/or a light chain variable region comprising the amino acid sequence of SEQ ID NO: 926.

[0558] In an embodiment, the PD-L1 targeting moiety comprises the anti-PD-L1 antibody 10A5, or fragments thereof, as disclosed in US 2013/0309250 and WO2007/005874, the entire disclosures of which are hereby incorporated by reference. In illustrative embodiments, 10A5 or an antigen-binding fragment thereof for use in the methods provided herein comprises a heavy chain variable region comprising the amino acid sequence of SEQ ID NO: 927; and/or a light chain variable region comprising the amino acid sequence of SEQ ID NO: 928.

[0559] In an embodiment, the PD-L1 targeting moiety comprises the anti-PD-L1 antibody 5F8, or fragments thereof, as disclosed in US 2013/0309250 and WO2007/005874, the entire disclosures of which are hereby incorporated by reference. In illustrative embodiments, 5F8 or an antigen-binding fragment thereof for use in the methods provided herein comprises a heavy chain variable region comprising the amino acid sequence of SEQ ID NO: 929; and/or a light chain variable region comprising the amino acid sequence of SEQ ID NO: 930.

[0560] In an embodiment, the PD-L1 targeting moiety comprises the anti-PD-L1 antibody 10H10, or fragments thereof, as disclosed in US 2013/0309250 and WO2007/005874, the entire disclosures of which are hereby incorporated by reference. In illustrative embodiments, 10H10 or an antigen-binding fragment thereof for use in the methods provided herein comprises a heavy chain variable region comprising the amino acid sequence of SEQ ID NO: 931; and/or a light chain variable region comprising the amino acid sequence of SEQ ID NO: 932.

[0561] In an embodiment, PD-L1 the targeting moiety comprises the anti-PD-L1 antibody 1B12, or fragments thereof, as disclosed in US 2013/0309250 and WO2007/005874, the entire disclosures of which are hereby incorporated by reference. In illustrative embodiments, 1B12 or an antigen-binding fragment thereof for use in the methods provided herein comprises a heavy chain variable region comprising the amino acid sequence of SEQ ID NO: 933; and/or a light chain variable region comprising the amino acid sequence of SEQ ID NO: 934.

[0562] In an embodiment, the PD-L1 targeting moiety comprises the anti-PD-L1 antibody 7H1, or fragments thereof, as disclosed in US 2013/0309250 and WO2007/005874, the entire disclosures of which are hereby incorporated by reference. In illustrative embodiments, 7H1 or an antigen-binding fragment thereof for use in the methods provided herein comprises a heavy chain variable region comprising the amino acid sequence of SEQ ID NO: 935; and/or a light chain variable region comprising the amino acid sequence of SEQ ID NO: 936.

[0563] In an embodiment, the PD-L1 targeting moiety comprises the anti-PD-L1 antibody 11E6, or fragments thereof, as disclosed in US 2013/0309250 and WO2007/005874, the entire disclosures of which are hereby incorporated by reference. In illustrative embodiments, 11E6 or an antigen-binding fragment thereof for use in the methods provided herein comprises a heavy chain variable region comprising the amino acid sequence of SEQ ID NO: 937; and/or a light chain variable region comprising the amino acid sequence of SEQ ID NO: 938.

[0564] In an embodiment, the PD-L1 targeting moiety comprises the anti-PD-L1 antibody 12B7, or fragments thereof, as disclosed in US 2013/0309250 and WO2007/005874, the entire disclosures of which are hereby incorporated by reference. In illustrative embodiments, 12B7 or an antigen-binding fragment thereof for use in the methods provided herein comprises a heavy chain variable region comprising the amino acid sequence of SEQ ID NO: 939; and/or a light chain variable region comprising the amino acid sequence of SEQ ID NO: 940.

[0565] In an embodiment, the PD-L1 targeting moiety comprises the anti-PD-L1 antibody 13G4, or fragments thereof, as disclosed in US 2013/0309250 and WO2007/005874, the entire disclosures of which are hereby incorporated by reference. In illustrative embodiments, 13G4 or an antigen-binding fragment thereof for use in the methods provided herein comprises a heavy chain variable region comprising the amino acid sequence of SEQ ID NO: 941; and/or a light chain variable region comprising the amino acid sequence of SEQ ID NO: 942.

[0566] In an embodiment, the PD-L1 targeting moiety comprises the anti-PD-L1 antibody 1E12, or fragments thereof, as disclosed in US 2014/0044738, the entire disclosures of which are hereby incorporated by reference. In illustrative embodiments, 1E12 or an antigen-binding fragment thereof for use in the methods provided herein comprises a heavy chain variable region comprising the amino acid sequence of SEQ ID NO: 943; and/or a light chain variable region comprising the amino acid sequence of SEQ ID NO: 944.

[0567] In an embodiment, the PD-L1 targeting moiety comprises the anti-PD-L1 antibody 1F4, or fragments thereof, as disclosed in US 2014/0044738, the entire disclosures of which are hereby incorporated by reference. In illustrative embodiments, 1F4 or an antigen-binding fragment thereof for use in the methods provided herein comprises a heavy chain variable region comprising the amino acid sequence of SEQ ID NO: 945; and/or a light chain variable region comprising the amino acid sequence of SEQ ID NO: 946.

[0568] In an embodiment, the PD-L1 targeting moiety comprises the anti-PD-L1 antibody 2G11, or fragments thereof, as disclosed in US 2014/0044738, the entire disclosures of which are hereby incorporated by reference. In illustrative embodiments, 2G11 or an antigen-binding fragment thereof for use in the methods provided herein comprises a heavy chain variable region comprising the amino acid sequence of SEQ ID NO: 947; and/or a light chain variable region comprising the amino acid sequence of SEQ ID NO: 948.

[0569] In an embodiment, the PD-L1 targeting moiety comprises the anti-PD-L1 antibody 3B6, or fragments thereof, as disclosed in US 2014/0044738, the entire disclosures of which are hereby incorporated by reference. In illustrative embodiments, 3B6 or an antigen-binding fragment thereof for use in the methods provided herein comprises a heavy chain variable region comprising the amino acid sequence of SEQ ID NO: 949; and/or a light chain variable region comprising the amino acid sequence of SEQ ID NO: 950.

[0570] In an embodiment, the PD-L1 targeting moiety comprises the anti-PD-L1 antibody 3D10, or fragments thereof, as disclosed in US 2014/0044738 and WO2012/145493, the entire disclosures of which are hereby incorporated by reference. In illustrative embodiments, 3D10 or an antigen-binding fragment thereof for use in the methods provided herein comprises a heavy chain variable region comprising the amino acid sequence of SEQ ID NO: 951; and/or a light chain variable region comprising the amino acid sequence of SEQ ID NO: 952.

[0571] In an embodiment, the PD-L1 targeting moiety comprises any one of the anti-PD-L1 antibodies disclosed in US2011/0271358 and WO2010/036959, the entire contents of which are hereby incorporated by reference. In illustrative embodiments, the antibody or an antigen-binding fragment thereof for use in the methods provided herein comprises a heavy chain comprising an amino acid sequence selected from SEQ ID Nos: 34-38 of US2011/0271358 (SEQ ID Nos.: 953-957) and/or a light chain comprising an amino acid sequence selected from SEQ ID Nos: 39-42 of US2011/0271358 (SEQ ID Nos.: 958-961).

[0572] In an embodiment, the PD-L1 targeting moiety comprises the anti-PD-L1 antibody 2.7A4, or fragments thereof, as disclosed in WO 2011/066389, U.S. Pat. No. 8,779,108, and US2014/0356353, the entire disclosures of which are hereby incorporated by reference. In illustrative embodiments, 2.7A4 or an antigen-binding fragment thereof for use in the methods provided herein comprises a heavy chain variable region comprising the amino acid sequence of SEQ ID No: 2 of WO 2011/066389 (SEQ ID NO: 962); and/or a light chain variable region comprising the amino acid sequence of SEQ ID No: 7 of WO 2011/066389 (SEQ ID NO: 963).

[0573] In an embodiment, the PD-L1 targeting moiety comprises the anti-PD-L1 antibody 2.9D10, or fragments thereof, as disclosed in WO 2011/066389, U.S. Pat. No. 8,779,108, and US2014/0356353, the entire disclosures of which are hereby incorporated by reference. In illustrative embodiments, 2.9D10 or an antigen-binding fragment thereof for use in the methods provided herein comprises a heavy chain variable region comprising the amino acid sequence of SEQ ID No: 12 of WO 2011/066389 (SEQ ID NO: 964); and/or a light chain variable region comprising the amino acid sequence of SEQ ID No: 17 of WO 2011/066389 (SEQ ID NO: 965).

[0574] In an embodiment, the PD-L1 targeting moiety comprises the anti-PD-L1 antibody 2.14H9, or fragments thereof, as disclosed in WO 2011/066389, U.S. Pat. No. 8,779,108, and US2014/0356353, the entire disclosures of which are hereby incorporated by reference. In illustrative embodiments, 2.14H9 or an antigen-binding fragment thereof for use in the methods provided herein comprises a heavy chain variable region comprising the amino acid sequence of SEQ ID No: 22 of WO 2011/066389 (SEQ ID NO: 966); and/or a light chain variable region comprising the amino acid sequence of SEQ ID No: 27 of WO 2011/066389 (SEQ ID NO: 967).

[0575] In an embodiment, the PD-L1 targeting moiety comprises the anti-PD-L1 antibody 2.20A8, or fragments thereof, as disclosed in WO 2011/066389, U.S. Pat. No. 8,779,108, and US2014/0356353, the entire disclosures of which are hereby incorporated by reference. In illustrative embodiments, 2.20A8 or an antigen-binding fragment thereof for use in the methods provided herein comprises a heavy chain variable region comprising the amino acid sequence of SEQ ID No: 32 of WO 2011/066389 (SEQ ID NO: 968); and/or a light chain variable region comprising the amino acid sequence of SEQ ID No: 37 of WO 2011/066389 (SEQ ID NO: 969).

[0576] In an embodiment, the PD-L1 targeting moiety comprises the anti-PD-L1 antibody 3.15G8, or fragments thereof, as disclosed in WO 2011/066389, U.S. Pat. No. 8,779,108, and US2014/0356353, the entire disclosures of which are hereby incorporated by reference. In illustrative embodiments, 3.15G8 or an antigen-binding fragment thereof for use in the methods provided herein comprises a heavy chain variable region comprising the amino acid sequence of SEQ ID No: 42 of WO 2011/066389 (SEQ ID NO: 970); and/or a light chain variable region comprising the amino acid sequence of SEQ ID No: 47 of WO 2011/066389 (SEQ ID NO: 971).

[0577] In an embodiment, the PD-L1 targeting moiety comprises the anti-PD-L1 antibody 3.18G1, or fragments thereof, as disclosed in WO 2011/066389, U.S. Pat. No. 8,779,108, and US2014/0356353, the entire disclosures of which are hereby incorporated by reference. In illustrative embodiments, 3.18G1 or an antigen-binding fragment thereof for use in the methods provided herein comprises a heavy chain variable region comprising the amino acid sequence of SEQ ID No: 52 of WO 2011/066389 (SEQ ID NO: 972); and/or a light chain variable region comprising the amino acid sequence of SEQ ID No: 57 of WO 2011/066389 (SEQ ID NO: 973).

[0578] In an embodiment, the PD-L1 targeting moiety comprises the anti-PD-L1 antibody 2.7A4OPT, or fragments thereof, as disclosed in WO 2011/066389, U.S. Pat. No. 8,779,108, and US2014/0356353, and US2014/0356353, the entire disclosures of which are hereby incorporated by reference. In illustrative embodiments, 2.7A4OPT or an antigen-binding fragment thereof for use in the methods provided herein comprises a heavy chain variable region comprising the amino acid sequence of SEQ ID No: 62 of WO 2011/066389 (SEQ ID NO: 974); and/or a light chain variable region comprising the amino acid sequence of SEQ ID No: 67 of WO 2011/066389 (SEQ ID NO: 975).

[0579] In an embodiment, the PD-L1 targeting moiety comprises the anti-PD-L1 antibody 2.14H9OPT, or fragments thereof, as disclosed in WO 2011/066389, U.S. Pat. No. 8,779,108, and US2014/0356353, the entire disclosures of which are hereby incorporated by reference. In illustrative embodiments, 2.14H9OPT or an antigen-binding fragment thereof for use in the methods provided herein comprises a heavy chain variable region comprising the amino acid sequence of SEQ ID No: 72 of WO 2011/066389 (SEQ ID NO: 976); and/or a light chain variable region comprising the amino acid sequence of SEQ ID No: 77 of WO 2011/066389 (SEQ ID NO: 977).

[0580] In an embodiment, the PD-L1 targeting moiety comprises any one of the anti-PD-L1 antibodies disclosed in WO2016/061142, the entire contents of which are hereby incorporated by reference. In illustrative embodiments, the antibody or an antigen-binding fragment thereof for use in the methods provided herein comprises a heavy chain comprising an amino acid sequence selected from SEQ ID Nos: 18, 30, 38, 46, 50, 54, 62, 70, and 78 of WO2016/061142 (SEQ ID Nos.: 978, 979, 980, 981, 982, 983, 984, 985, and 986, respectively); and/or a light chain comprising an amino acid sequence selected from SEQ ID Nos: 22, 26, 34, 42, 58, 66, 74, 82, and 86 of WO2016/061142 (SEQ ID Nos.: 987, 988, 989, 990, 991, 992, 993, 994, and 995, respectively).

[0581] In an embodiment, the PD-L1 targeting moiety comprises any one of the anti-PD-L1 antibodies disclosed in WO2016/022630, the entire contents of which are hereby incorporated by reference. In illustrative embodiments, the antibody or an antigen-binding fragment thereof for use in the methods provided herein comprises a heavy chain comprising an amino acid sequence selected from SEQ ID Nos: 2, 6, 10, 14, 18, 22, 26, 30, 34, 38, 42, and 46 of WO2016/022630 (SEQ ID Nos.: 996, 997, 998, 999, 1000, 1001, 1002, 1003, 1004, 1005, 1006, and 1007, respectively); and/or a light chain comprising an amino acid sequence selected from SEQ ID Nos: 4, 8, 12, 16, 20, 24, 28, 32, 36, 40, 44, and 48 of WO2016/022630 (SEQ ID Nos: 1008, 1009, 1010, 1011, 1012, 1013, 1014, 1015, 1016, 1017, 1018, and 1019, respectively).

[0582] In an embodiment, the PD-L1 targeting moiety comprises any one of the anti-PD-L1 antibodies disclosed in WO2015/112900, the entire contents of which are hereby incorporated by reference. In illustrative embodiments, the antibody or an antigen-binding fragment thereof for use in the methods provided herein comprises a heavy chain comprising an amino acid sequence selected from SEQ ID Nos: 38, 50, 82, and 86 of WO 2015/112900 (SEQ ID Nos.: 1020, 1021, 1022, and 1023, respectively); and/or a light chain comprising an amino acid sequence selected from SEQ ID Nos: 42, 46, 54, 58, 62, 66, 70, 74, and 78 of WO 2015/112900 (SEQ ID Nos: 1024, 1025, 1026, 1027, 1028, 1029, 1030, 1031, and 1032, respectively).

[0583] In an embodiment, the PD-L1 targeting moiety comprises any one of the anti-PD-L1 antibodies disclosed in WO 2010/077634 and U.S. Pat. No. 8,217,149, the entire disclosures of which are hereby incorporated by reference. In illustrative embodiments, the anti-PD-L1 antibody or an antigen-binding fragment thereof for use in the methods provided herein comprises a heavy chain region comprising the amino acid sequence of SEQ ID No: 20 of WO 2010/077634 (SEQ ID NO: 1033); and/or a light chain variable region comprising the amino acid sequence of SEQ ID No: 21 of WO 2010/077634 (SEQ ID NO: 1034). In an embodiment, the PD-L1 targeting moiety comprises any one of the anti-PD-L1 antibodies obtainable from the hybridoma accessible under CNCM deposit numbers CNCM I-4122, CNCM I-4080 and CNCM I-4081 as disclosed in US 20120039906, the entire disclosures of which are hereby incorporated by reference.

[0584] In an embodiment, the PD-L1 targeting moiety comprises a VHH directed against PD-L1 as disclosed, for example, in U.S. Pat. No. 8,907,065 and WO 2008/071447, the entire disclosures of which are hereby incorporated by reference. In illustrative embodiments, the VHHs against PD-L1 comprise SEQ ID NOS: 394-399 of U.S. Pat. No. 8,907,065 (SEQ ID NOS: 1035-1040, respectively).

[0585] In some embodiments, the targeting moiety binds to PD-L1 and the signaling moiety is a wild type IFNα or a modified IFNα. In some embodiments, the Fc chimeric protein is in one of the forms shown in FIGS. 4A to 4D, where the targeting moiety binds to PD-L1 and the signaling moiety is a wild type IFNα. In some embodiments, the targeting moiety binds to PD-L1 (e.g., scFv) and the signaling moiety is a wild type IFNα2.

[0586] PD-L2 Targeting Moieties

[0587] In some embodiments, the targeting moiety is directed against PD-L2. In some embodiments, the targeting moiety selectively binds a PD-L2 polypeptide. In some embodiments, the PD-L2 targeting moiety comprises an antibody, an antibody derivative or format, a peptide or polypeptide, or a fusion protein that selectively binds a PD-L2 polypeptide.

[0588] In an embodiment, the PD-L2 targeting moiety comprises a VHH directed against PD-L2 as disclosed, for example, in U.S. Pat. No. 8,907,065 and WO 2008/071447, the entire disclosures of which are hereby incorporated by reference. In illustrative embodiments, the VHHs against PD-L2 comprise SEQ ID Nos: 449-455 of U.S. Pat. No. 8,907,065 (SEQ ID Nos: 1041-1047, respectively).

[0589] In an embodiment, the PD-L2 targeting moiety comprises any one of the anti-PD-L2 antibodies disclosed in US2011/0271358 and WO2010/036959, the entire contents of which are hereby incorporated by reference. In illustrative embodiments, the antibody or an antigen-binding fragment thereof for use in the methods provided herein comprises a heavy chain comprising an amino acid sequence selected from SEQ ID Nos: 43-47 of US2011/0271358 (SEQ ID Nos: 1048-1052, respectively); and/or a light chain comprising an amino acid sequence selected from SEQ ID Nos: 48-51 of US2011/0271358 (SEQ ID Nos: 1053-1056, respectively).

[0590] In some embodiments, the present technology contemplates the use of any natural or synthetic analogs, mutants, variants, alleles, homologs and orthologs (herein collectively referred to as “analogs”) of the PD-1, PD-L1, or PD-L2 targeting moieties described herein. In some embodiments, the amino acid sequence of the PD-1, PD-L1, or PD-L2 targeting moiety further includes an amino acid analog, an amino acid derivative, or other non-classical amino acids.

[0591] In various embodiments, the PD-1, PD-L1, or PD-L2 targeting moieties disclosed herein comprise a sequence that targets PD-1, PD-L1, or PD-L2 which is at least about 60%, at least about 61%, at least about 62%, at least about 63%, at least about 64%, at least about 65%, at least about 66%, at least about 67%, at least about 68%, at least about 69%, at least about 70%, at least about 71%, at least about 72%, at least about 73%, at least about 74%, at least about 75%, at least about 76%, at least about 77%, at least about 78%, at least about 79%, at least about 80%, at least about 81%, at least about 82%, at least about 83%, at least about 84%, at least about 85%, at least about 86%, at least about 87%, at least about 88%, at least about 89%, at least about 90%, at least about 91%, at least about 92%, at least about 93%, at least about 94%, at least about 95%, at least about 96%, at least about 97%, at least about 98%, at least about 99%, or 100% identical to any of the PD-1, PD-L1, and/or PD-L2 sequences disclosed herein (e.g. about 60%, or about 61%, or about 62%, or about 63%, or about 64%, or about 65%, or about 66%, or about 67%, or about 68%, or about 69%, or about 70%, or about 71%, or about 72%, or about 73%, or about 74%, or about 75%, or about 76%, or about 77%, or about 78%, or about 79%, or about 80%, or about 81%, or about 82%, or about 83%, or about 84%, or about 85%, or about 86%, or about 87%, or about 88%, or about 89%, or about 90%, or about 91%, or about 92%, or about 93%, or about 94%, or about 95%, or about 96%, or about 97%, or about 98%, about 99% or about 100% sequence identity with any of the PD-1, PD-L1, and/or PD-L2 sequences disclosed herein).

[0592] In various embodiments, the PD-1, PD-L1, or PD-L2 targeting moiety comprises a binding agent comprising an amino acid sequence having one or more amino acid mutations with respect to any one of the PD-1, PD-L1, or PD-L2 sequences disclosed herein. In various embodiments, the PD-1, PD-L1, or PD-L2 targeting moiety comprises a binding agent comprising an amino acid sequence having one, or two, or three, or four, or five, or six, or seen, or eight, or nine, or ten, or fifteen, or twenty amino acid mutations with respect to any one of the sequences disclosed herein. In some embodiments, the one or more amino acid mutations may be independently selected from substitutions, insertions, deletions, and truncations.

[0593] In some embodiments, the amino acid mutations are amino acid substitutions, and may include conservative and/or non-conservative substitutions.

[0594] “Conservative substitutions” may be made, for instance, on the basis of similarity in polarity, charge, size, solubility, hydrophobicity, hydrophilicity, and/or the amphipathic nature of the amino acid residues involved. The 20 naturally occurring amino acids can be grouped into the following six standard amino acid groups: (1) hydrophobic: Met, Ala, Val, Leu, Ile; (2) neutral hydrophilic: Cys, Ser, Thr; Asn, Gln; (3) acidic: Asp, Glu; (4) basic: His, Lys, Arg; (5) residues that influence chain orientation: Gly, Pro; and (6) aromatic: Trp, Tyr, Phe.

[0595] As used herein, “conservative substitutions” are defined as exchanges of an amino acid by another amino acid listed within the same group of the six standard amino acid groups shown above. For example, the exchange of Asp by Glu retains one negative charge in the so modified polypeptide. In addition, glycine and proline may be substituted for one another based on their ability to disrupt α-helices.

[0596] As used herein, “non-conservative substitutions” are defined as exchanges of an amino acid by another amino acid listed in a different group of the six standard amino acid groups (1) to (6) shown above.

[0597] In various embodiments, the substitutions may also include non-classical amino acids. Exemplary non-classical amino acids include, but are not limited to, selenocysteine, pyrrolysine, N-formylmethionine β-alanine, GABA and δ-Aminolevulinic acid, 4-aminobenzoic acid (PABA), D-isomers of the common amino acids, 2,4-diaminobutyric acid, α-amino isobutyric acid, 4-aminobutyric acid, Abu, 2-amino butyric acid, γ-Abu, ε-Ahx, 6-amino hexanoic acid, Aib, 2-amino isobutyric acid, 3-amino propionic acid, ornithine, norleucine, norvaline, hydroxyproline, sarcosme, citrulline, homocitrulline, cysteic acid, t-butylglycine, t-butylalanine, phenylglycine, cyclohexylalanine, β-alanine, fluoro-amino acids, designer amino acids such as β methyl amino acids, C α-methyl amino acids, N α-methyl amino acids, and amino acid analogs in general.

[0598] In various embodiments, the amino acid mutation may be in the CDRs of the targeting moiety (e.g., the CDR1, CDR2 or CDR3 regions). In another embodiment, amino acid alteration may be in the framework regions (FRs) of the targeting moiety (e.g., the FR1, FR2, FR3, or FR4 regions).

[0599] Modification of the amino acid sequences may be achieved using any known technique in the art e.g., site-directed mutagenesis or PCR based mutagenesis. Such techniques are described, for example, in Sambrook et al., Molecular Cloning: A Laboratory Manual, Cold Spring Harbor Press, Plainview, N.Y., 1989 and Ausubel et al., Current Protocols in Molecular Biology, John Wiley & Sons, New York, N.Y., 1989.

[0600] In various embodiments, the mutations do not substantially reduce the present PD-1, PD-L1, or PD-L2 targeting moiety's capability to specifically bind to PD-1, PD-L1, or PD-L2. In various embodiments, the mutations do not substantially reduce the PD-1, PD-L1, or PD-L2 targeting moiety's capability to specifically bind to PD-1, PD-L1, or PD-L2 and without functionally modulating (e.g., partially or fully neutralizing) PD-1, PD-L1, or PD-L2.

[0601] In various embodiments, the binding affinity of the PD-1, PD-L1, or PD-L2 targeting moiety for the full-length and/or mature forms and/or isoforms and/or splice variants and/or fragments and/or monomeric and/or dimeric forms and/or any other naturally occurring or synthetic analogs, variants, or mutants (including monomeric and/or dimeric forms) of human PD-1, PD-L1, or PD-L2 may be described by the equilibrium dissociation constant (K_{D}). In various embodiments, the PD-1, PD-L1, or PD-L2 targeting moiety binds to the full-length and/or mature forms and/or isoforms and/or splice variants and/or fragments and/or any other naturally occurring or synthetic analogs, variants, or mutants (including monomeric and/or dimeric forms) of human PD-1, PD-L1, or PD-L2 with a K_{D} of less than about 1 uM, about 900 nM, about 800 nM, about 700 nM, about 600 nM, about 500 nM, about 400 nM, about 300 nM, about 200 nM, about 100 nM, about 90 nM, about 80 nM, about 70 nM, about 60 nM, about 50 nM, about 40 nM, about 30 nM, about 20 nM, about 10 nM, or about 5 nM, or about 1 nM.

[0602] In some embodiments, the PD-1, PD-L1, and/or PD-L2 targeting moieties disclosed herein may comprise any combination of heavy chain, light chain, heavy chain variable region, light chain variable region, complementarity determining region (CDR), and framework region sequences that target PD-1, PD-L1, and/or PD-L2 as disclosed herein.

[0603] Additional antibodies, antibody derivatives or formats, peptides or polypeptides, or fusion proteins that selectively bind or target PD-1, PD-L1 and/or PD-L2 are disclosed in WO 2011/066389, US 2008/0025980, US 2013/0034559, U.S. Pat. No. 8,779,108, US 2014/0356353, U.S. Pat. No. 8,609,089, US 2010/028330, US 2012/0114649, WO 2010/027827, WO 2011/066342, U.S. Pat. No. 8,907,065, WO 2016/062722, WO 2009/101611, WO2010/027827, WO 2011/066342, WO 2007/005874, WO 2001/014556, US2011/0271358, WO 2010/036959, WO 2010/077634, U.S. Pat. No. 8,217,149, US 2012/0039906, WO 2012/145493, US 2011/0318373, U.S. Pat. No. 8,779,108, US 20140044738, WO 2009/089149, WO 2007/00587, WO 2016061142, WO 2016,02263, WO 2010/077634, and WO 2015/112900, the entire disclosures of which are hereby incorporated by reference.

### SIRP1α Targeting Moieties

[0604] In some embodiments, the targeting moiety binds a signal regulatory protein α-1 (SIRP1α). SIRP1α (also known as SIRPα) belongs to a family of cell immune receptors encompassing inhibitory (SIRPα), activating (SIRPβ), nonsignaling (SIRPγ) and soluble (SIRPδ) members. SIRP1α is expressed primarily on myeloid cells, including macrophages, granulocytes, myeloid dendritic cells (DCs), mast cells, and their precursors, including hematopoietic stem cells. SIRP1α acts as an inhibitory receptor that interacts with a broadly expressed transmembrane glycoprotein CD47 to regulate phagocytosis. In particular, the binding of SIRP1α on macrophages by CD47 expressed on target cells, generates an inhibitory signal that negatively regulates phagocytosis of the target cell.

[0605] In some embodiments, the SIRP1α targeting moiety specifically recognizes and binds SIRP1α on macrophages.

[0606] In some embodiments, the SIRP1α targeting moiety specifically recognizes and binds SIRP1α on monocytes.

[0607] In some embodiments, the SIRP1α targeting moiety specifically recognizes and binds SIRP1α on TAMs (Tumor Associated Macrophages).

[0608] In some embodiments, the SIRP1α targeting moiety specifically recognizes and binds SIRP1α on dendritic cells, including without limitation cDC2 and pDC

[0609] In some embodiments, the SIRP1α targeting moiety recognizes one or more linear epitopes present on SIRP1α.

[0610] In some embodiments, a linear epitope refers to any continuous sequence of amino acids present on SIRP1α. In another embodiment, the recognition domain recognizes one or more conformational epitopes present on SIRP1α. As used herein, a conformation epitope refers to one or more sections of amino acids (which may be discontinuous) which form a three-dimensional surface with features and/or shapes and/or tertiary structures capable of being recognized by an antigen recognition domain.

[0611] In some embodiments, the SIRP1α targeting moiety binds to the full-length and/or mature forms and/or isoforms and/or splice variants and/or fragments and/or any other naturally occurring or synthetic analogs, variants, or mutants of SIRP1α. In an embodiment, the SIRP1α is human SIRP1α. In various embodiments, the SIRP1α targeting moiety may bind to any forms of the human SIRP1α, including monomeric, dimeric, heterodimeric, multimeric and associated forms. In an embodiment, the SIRP1α targeting moiety binds to the monomeric form of SIRP1α. In another embodiment, the SIRP1α targeting moiety binds to a dimeric form of SIRP1α.

[0612] In some embodiments, the SIRP1α targeting moiety comprises a recognition domain that recognizes one or more epitopes present on human SIRP1α. In an embodiment, the SIRP1α targeting moiety comprises a recognition domain that recognizes human SIRP1α with a signal peptide sequence. An exemplary human SIRP1α polypeptide with a signal peptide sequence is SEQ ID NO:1057.

[0613] In some embodiments, the SIRP1α targeting moiety comprises a recognition domain that recognizes human SIRP1α without a signal peptide sequence. An exemplary human SIRP1α polypeptide without a signal peptide sequence is SEQ ID NO: 1058.

[0614] In some embodiments, the SIRP1α targeting moiety comprises a recognition domain that recognizes a polypeptide encoding human SIRP1α isoform 2 (SEQ ID NO: 1059).

[0615] In some embodiment, the SIRP1α targeting moiety comprises a recognition domain that recognizes a polypeptide encoding human SIRP1α isoform 4 (SEQ ID NO:1060).

[0616] In some embodiments, the SIRP1α targeting moiety may be any protein-based agent capable of specific binding, such as an antibody or derivatives thereof.

[0617] In some embodiments, the SIRP1α targeting moiety comprises antibody derivatives or formats. In some embodiments, the SIRP1α targeting moiety comprises a single-domain antibody, a recombinant heavy-chain-only antibody (VHH), a single-chain antibody (scFv), a shark heavy-chain-only antibody (VNAR), a microprotein (cysteine knot protein, knottin), a DARPin; a Tetranectin; an Affibody; a Transbody; an Anticalin; an AdNectin; an alphabody; a bicyclic peptide; an Affilin; a Microbody; a peptide aptamer; an alterase; a plastic antibodies; a phylomer; a stradobody; a maxibody; an evibody; a fynomer, an armadillo repeat protein, a Kunitz domain, an avimer, an atrimer, a probody, an immunobody, a triomab, a troybody; a pepbody; a vaccibody, a UniBody; Affimers, a DuoBody, a Fv, a Fab, a Fab′, a F(ab′)₂, a peptide mimetic molecule, or a small (e.g. synthetic or natural) molecule, e.g. without limitation, as described in Patent Publication Nos. or U.S. Pat. No. 7,417,130, US 2004/132094, U.S. Pat. No. 5,831,012, US 2004/023334, U.S. Pat. Nos. 7,250,297, 6,818,418, US 2004/209243, U.S. Pat. Nos. 7,838,629, 7,186,524, 6,004,746, 5,475,096, US 2004/146938, US 2004/157209, U.S. Pat. Nos. 6,994,982, 6,794,144, US 2010/239633, U.S. Pat. No. 7,803,907, US 2010/119446, and/or U.S. Pat. No. 7,166,697, the contents of which are hereby incorporated by reference in their entireties. See also, Storz MAbs. 2011 May-June; 3(3): 310-317.

[0618] In some embodiments, the SIRP1α targeting moiety comprises a single-domain antibody, such as VHH from, for example, an organism that produces VHH antibody such as a camelid, a shark, or a designed VHH. VHHs are antibody-derived therapeutic proteins that contain the unique structural and functional properties of naturally-occurring heavy-chain antibodies. VHH technology is based on fully functional antibodies from camelids that lack light chains. These heavy-chain antibodies contain a single variable domain (VHH) and two constant domains (CH2 and CH3).

[0619] In some embodiments, the SIRP1α targeting moiety comprises a VHH. In some embodiments, the VHH is a humanized VHH or camelized VHH.

[0620] In some embodiments, the VHH comprises a fully human V_{H} domain, e.g. a HUMABODY (Crescendo Biologics, Cambridge, UK). In some embodiments, fully human V_{H} domain, e.g. a HUMABODY is monovalent, bivalent, or trivalent. In some embodiments, the fully human V_{H} domain, e.g. a HUMABODY is mono- or multi-specific such as monospecific, bispecific, or trispecific. Illustrative fully human VH domains, e.g. HUMABODIES are described in, for example, WO 2016/113555 and WO2016/113557, the entire disclosure of which is incorporated by reference.

[0621] For example, in some embodiments, the SIRP1α targeting moiety comprises one or more antibodies, antibody derivatives or formats, peptides or polypeptides, VHHs, or fusion proteins that selectively bind SIRP1α. In some embodiments, the SIRP1α targeting moiety comprises an antibody or derivative thereof that specifically binds to SIRP1α. In some embodiments, the SIRP1α targeting moiety comprises a camelid heavy chain antibody (VHH) that specifically binds to SIRP1α.

[0622] In some embodiments, the SIRP1α targeting moiety is a VHH comprising a single amino acid chain having four “framework regions” or FRs and three “complementary determining regions” or CDRs. As used herein, “framework region” or “FR” refers to a region in the variable domain which is located between the CDRs. As used herein, “complementary determining region” or “CDR” refers to variable regions in VHHs that contains the amino acid sequences capable of specifically binding to antigenic targets. In various embodiments, the present Fc-based chimeric protein complex comprises a VHH having a variable domain comprising at least one CDR1, CDR2, and/or CDR3 sequences.

[0623] In some embodiments, the SIRP1α targeting moiety may comprise any combination of heavy chain, light chain, heavy chain variable region, light chain variable region, complementarity determining region (CDR), and framework region sequences that is known to recognize and bind to SIRP1α.

[0624] In some embodiments, the present technology contemplates the use of any natural or synthetic analogs, mutants, variants, alleles, homologs and orthologs (herein collectively referred to as “analogs”) of the SIRP1α targeting moieties described herein. In various embodiments, the amino acid sequence of the SIRP1α targeting moiety further includes an amino acid analog, an amino acid derivative, or other non-classical amino acids.

[0625] In some embodiments, the SIRP1α targeting moiety comprises a sequence that is at least 60% identical to any one of the SIRP1α sequences disclosed herein. For example, in some embodiments, the SIRP1α targeting moiety comprises a sequence that is at least about 60%, at least about 61%, at least about 62%, at least about 63%, at least about 64%, at least about 65%, at least about 66%, at least about 67%, at least about 68%, at least about 69%, at least about 70%, at least about 71%, at least about 72%, at least about 73%, at least about 74%, at least about 75%, at least about 76%, at least about 77%, at least about 78%, at least about 79%, at least about 80%, at least about 81%, at least about 82%, at least about 83%, at least about 84%, at least about 85%, at least about 86%, at least about 87%, at least about 88%, at least about 89%, at least about 90%, at least about 91%, at least about 92%, at least about 93%, at least about 94%, at least about 95%, at least about 96%, at least about 97%, at least about 98%, at least about 99%, or 100% identical to any of the SIRP1α sequences disclosed herein (e.g. about 60%, or about 61%, or about 62%, or about 63%, or about 64%, or about 65%, or about 66%, or about 67%, or about 68%, or about 69%, or about 70%, or about 71%, or about 72%, or about 73%, or about 74%, or about 75%, or about 76%, or about 77%, or about 78%, or about 79%, or about 80%, or about 81%, or about 82%, or about 83%, or about 84%, or about 85%, or about 86%, or about 87%, or about 88%, or about 89%, or about 90%, or about 91%, or about 92%, or about 93%, or about 94%, or about 95%, or about 96%, or about 97%, or about 98%, about 99% or about 100% sequence identity to any one of the SIRP1α sequences disclosed herein).

[0626] In some embodiments, the SIRP1α targeting moiety comprises an amino acid sequence having one or more amino acid mutations with respect to any targeting moiety sequence that is known to recognize and bind to SIRP1α. In various embodiments, the SIRP1α targeting moiety comprises an amino acid sequence having one, or two, or three, or four, or five, or six, or seen, or eight, or nine, or ten, or fifteen, twenty, thirty, forty, or fifty amino acid mutations with respect to any targeting moiety sequence that is known to recognize and bind to SIRP1α. In some embodiments, the one or more amino acid mutations may be independently selected from substitutions, insertions, deletions, and truncations.

[0627] In some embodiments, the amino acid mutations are amino acid substitutions, and may include conservative and/or non-conservative substitutions.

[0628] “Conservative substitutions” may be made, for instance, on the basis of similarity in polarity, charge, size, solubility, hydrophobicity, hydrophilicity, and/or the amphipathic nature of the amino acid residues involved. The 20 naturally occurring amino acids can be grouped into the following six standard amino acid groups: (1) hydrophobic: Met, Ala, Val, Leu, Ile; (2) neutral hydrophilic: Cys, Ser, Thr; Asn, Gln; (3) acidic: Asp, Glu; (4) basic: His, Lys, Arg; (5) residues that influence chain orientation: Gly, Pro; and (6) aromatic: Trp, Tyr, Phe.

[0629] As used herein, “conservative substitutions” are defined as exchanges of an amino acid by another amino acid listed within the same group of the six standard amino acid groups shown above. For example, the exchange of Asp by Glu retains one negative charge in the so modified polypeptide. In addition, glycine and proline may be substituted for one another based on their ability to disrupt α-helices.

[0630] As used herein, “non-conservative substitutions” are defined as exchanges of an amino acid by another amino acid listed in a different group of the six standard amino acid groups (1) to (6) shown above.

[0631] In various embodiments, the substitutions may also include non-classical amino acids. Exemplary non-classical amino acids include, but are not limited to, selenocysteine, pyrrolysine, N-formylmethionine β-alanine, GABA and δ-Aminolevulinic acid, 4-aminobenzoic acid (PABA), D-isomers of the common amino acids, 2,4-diaminobutyric acid, α-amino isobutyric acid, 4-aminobutyric acid, Abu, 2-amino butyric acid, γ-Abu, ε-Ahx, 6-amino hexanoic acid, Aib, 2-amino isobutyric acid, 3-amino propionic acid, ornithine, norleucine, norvaline, hydroxyproline, sarcosme, citrulline, homocitrulline, cysteic acid, t-butylglycine, t-butylalanine, phenylglycine, cyclohexylalanine, β-alanine, fluoro-amino acids, designer amino acids such as β methyl amino acids, C α-methyl amino acids, N α-methyl amino acids, and amino acid analogs in general.

[0632] In various embodiments, the amino acid mutation may be in the CDRs of the targeting moiety (e.g., the CDR1, CDR2 or CDR3 regions). In another embodiment, amino acid alteration may be in the framework regions (FRs) of the targeting moiety (e.g., the FR1, FR2, FR3, or FR4 regions).

[0633] Modification of the amino acid sequences may be achieved using any known technique in the art e.g., site-directed mutagenesis or PCR based mutagenesis. Such techniques are described, for example, in Sambrook et al., Molecular Cloning: A Laboratory Manual, Cold Spring Harbor Press, Plainview, N.Y., 1989 and Ausubel et al., Current Protocols in Molecular Biology, John Wiley & Sons, New York, N.Y., 1989.

[0634] In various embodiments, the mutations do not substantially reduce the SIRP1α targeting moiety's capability to specifically recognize and bind to SIRP1α. In various embodiments, the mutations do not substantially reduce the SIRP1α targeting moiety's ability to bind specifically to SIRP1α and without functionally modulating (e.g., partially or fully neutralizing) SIRP1α.

[0635] In various embodiments, the binding affinity of the SIRP1α targeting moiety for the full-length and/or mature forms and/or isoforms and/or splice variants and/or fragments and/or monomeric and/or dimeric forms and/or any other naturally occurring or synthetic analogs, variants, or mutants of SIRP1α may be described by the equilibrium dissociation constant (K_{D}). In various embodiments, the SIRP1α targeting moiety that binds to the full-length and/or mature forms and/or isoforms and/or splice variants and/or fragments and/or any other naturally occurring or synthetic analogs, variants, or mutants (including monomeric and/or dimeric forms) of SIRP1α with a K_{D} of less than about 1 uM, about 900 nM, about 800 nM, about 700 nM, about 600 nM, about 500 nM, about 400 nM, about 300 nM, about 200 nM, about 100 nM, about 90 nM, about 80 nM, about 70 nM, about 60 nM, about 50 nM, about 40 nM, about 30 nM, about 20 nM, about 10 nM, or about 5 nM, or about 1 nM.

[0636] In various embodiments, the SIRP1α targeting moiety binds but does not functionally modulate the antigen of interest, i.e., SIRP1α. For example, in some embodiments, the SIRP1α targeting moiety simply targets the antigen but does not substantially functionally modulate (e.g. substantially inhibit, reduce or neutralize) a biological effect that the antigen has. In various embodiments, the targeting moiety of the present Fc-based chimeric protein complex binds an epitope that is physically separate from an antigen site that is important for its biological activity (e.g. an antigen's active site).

[0637] In some embodiments, the SIRP1α targeting moiety binds but functionally modulates the antigen of interest, i.e., SIRP1α. For example, in some embodiments, the SIRP1α targeting moiety targets the antigen, i.e., SIRP1α, and functionally modulates (e.g. inhibit, reduce or neutralize) a biological effect that the antigen has. Such binding along with functional modulation may find use in various embodiments of the present invention including methods in which the present Fc-based chimeric protein complex is used to directly or indirectly recruit active immune cells to a site of need via an effector antigen.

[0638] In some embodiments, the SIRP1α targeting moiety may be used to directly or indirectly recruit macrophages via SIRP1α to a tumor cell in a method of reducing or eliminating a tumor (e.g. the present Fc-based chimeric protein complex may comprise a targeting moiety having an anti-SIRP1α antigen recognition domain and a targeting moiety having a recognition domain (e.g. antigen recognition domain) directed against a tumor antigen or receptor). Evidence indicates that tumor cells frequently upregulate CD47 which engages SIRP1α so as to evade phagocytosis. Accordingly, in various embodiments, it may be desirable to directly or indirectly recruit macrophages to tumor cells and functionally inhibit, reduce, or neutralize the inhibitory activity of SIRP1α thereby resulting in phagocytosis of the tumor cells by the macrophages. In various embodiments, the present Fc-based chimeric protein complex enhances phagocytosis of tumor cells or any other undesirable cells by macrophages.

[0639] SIRP alpha targeting moieties may comprise CDRs of antibodies as described in WO200140307A1, WO2013056352A1, WO2015138600A2, WO2017178653A2, WO2018057669A1, WO2018107058A1, WO2018190719A2, WO2019023347A1, the contents of which are hereby incorporated by reference in their entireties.

### FAP Targeting Moieties

[0640] Fibroblast activation protein (FAP) is a 170 kDa melanoma membrane-bound gelatinase that belongs to the serine protease family. FAP is selectively expressed in reactive stromal fibroblasts of epithelial cancers, granulation tissue of healing wounds, and malignant cells of bone and soft tissue sarcomas. FAP is believed to be involved in the control of fibroblast growth or epithelial-mesenchymal interactions during development, tissue repair, and epithelial carcinogenesis.

[0641] In some embodiments, the targeting moiety is a FAP targeting moiety that is a protein-based agent capable of specific binding to FAP. In some embodiments, the FAP targeting moiety is a protein-based agent capable of specific binding to FAP without functional modulation (e.g., partial or full neutralization) of FAP.

[0642] In some embodiments, the fibroblast targeting moiety targets F2 fibroblasts. In some embodiments, the fibroblast targeting moiety directly or indirectly alters the microenvironment of the F2 fibroblasts. In some embodiments, the fibroblast binding agent directly or indirectly polarizes the F2 fibroblast into F1 fibroblast.

[0643] F2 fibroblast(s) refers to pro-tumorigenic (or tumor promoting) cancer-associated fibroblasts (CAFs) (a/k/a Type II-CAF). F1 fibroblast(s) refers to tumor suppressive CAFs (a/k/a Type I-CAF). Polarization refers to changing the phenotype of cell, e.g. changing a tumorigenic F2 fibroblast to a tumor suppressive F1 fibroblast.

[0644] In some embodiments, the FAP targeting moiety targets a FAP marker.

[0645] In some embodiments, the FAP targeting moiety comprises a binding agent having an antigen recognition domain that recognizes an epitope present on FAP. In some embodiments, the antigen-recognition domain recognizes one or more linear epitopes present on FAP. In some embodiments, a linear epitope refers to any continuous sequence of amino acids present on FAP. In another embodiment, the antigen-recognition domain recognizes one or more conformational epitopes present on FAP. As used herein, a conformation epitope refers to one or more sections of amino acids (which may be discontinuous), which form a three-dimensional surface with features and/or shapes and/or tertiary structures capable of being recognized by an antigen recognition domain.

[0646] In some embodiments, the FAP targeting moiety can bind to the full-length and/or mature forms and/or isoforms and/or splice variants and/or fragments and/or any other naturally occurring or synthetic analogs, variants, or mutants of human FAP. In some embodiments, the FAP targeting moiety can bind to any forms of the human FAP, including monomeric, dimeric, heterodimeric, multimeric and associated forms. In an embodiment, the FAP targeting moiety binds to the monomeric form of FAP. In another embodiment, the FAP targeting moiety binds to a dimeric form of FAP. In a further embodiment, the FAP targeting moiety binds to glycosylated form of FAP, which may be either monomeric or dimeric.

[0647] In an embodiment, the FAP targeting moiety comprises an antigen recognition domain that recognizes one or more epitopes present on human FAP. In some embodiments, the human FAP comprises the amino acid sequence of SEQ ID NO: 1061.

[0648] In some embodiments, the FAP targeting moiety is capable of specific binding. In some embodiments, the FAP targeting moiety comprises an antigen recognition domain such as an antibody or derivatives thereof.

[0649] In some embodiments, the FAP targeting moiety comprises an antibody derivative or format. In some embodiments, the FAP targeting moiety comprises a single-domain antibody, a recombinant heavy-chain-only antibody (VHH), a single-chain antibody (scFv), a shark heavy-chain-only antibody (VNAR), a microprotein (cysteine knot protein, knottin), a DARPin; a Tetranectin; an Affibody; a Transbody; an Anticalin; an AdNectin; an alphabody; a bicyclic peptide; an Affilin; an Affimer, a Microbody; an aptamer; an alterase; a plastic antibody; a phylomer; a stradobody; a maxibody; an evibody; a fynomer, an armadillo repeat protein, a Kunitz domain, an avimer, an atrimer, a probody, an immunobody, a triomab, a troybody; a pepbody; a vaccibody, a UniBody; a DuoBody, a Fv, a Fab, a Fab′, a F(ab′)2, a peptide mimetic molecule, or a small (e.g. synthetic or natural) molecule, e.g. without limitation, as described in Patent Publication Nos. or U.S. Pat. No. 7,417,130, US 2004/132094, U.S. Pat. No. 5,831,012, US 2004/023334, U.S. Pat. Nos. 7,250,297, 6,818,418, US 2004/209243, U.S. Pat. Nos. 7,838,629, 7,186,524, 6,004,746, 5,475,096, US 2004/146938, US 2004/157209, U.S. Pat. Nos. 6,994,982, 6,794,144, US 2010/239633, U.S. Pat. No. 7,803,907, US 2010/119446, and/or U.S. Pat. No. 7,166,697, the contents of which are hereby incorporated by reference in their entireties. See also, Storz MAbs. 2011 May-June; 3(3): 310-317.

[0650] In some embodiments, the FAP targeting moiety comprises a single-domain antibody, such as a VHH. The VHH may be derived from, for example, an organism that produces VHH antibody such as a camelid, a shark, or the VHH may be a designed VHH. VHHs are antibody-derived therapeutic proteins that contain the unique structural and functional properties of naturally-occurring heavy-chain antibodies. VHH technology is based on fully functional antibodies from camelids that lack light chains. These heavy-chain antibodies contain a single variable domain (VHH) and two constant domains (CH2 and CH3).

[0651] In an embodiment, the FAP targeting moiety comprises a VHH. In some embodiments, the VHH is a humanized VHH or camelized VHH.

[0652] In some embodiments, the VHH comprises a fully human VH domain, e.g. a HUMABODY (Crescendo Biologics, Cambridge, UK). In some embodiments, fully human VH domain, e.g. a HUMABODY is monovalent, bivalent, or trivalent. In some embodiments, the fully human VH domain, e.g. a HUMABODY is mono- or multi-specific such as monospecific, bispecific, or trispecific. Illustrative fully human VH domains, e.g. HUMABODIES are described in, for example, WO 2016/113555 and WO 2016/113557, the entire disclosures of which are incorporated by reference.

[0653] By way of example, but not by way of limitation, in some embodiments, a human VHH FAP targeting moiety comprises an amino acid sequence selected from the following sequences: 2HFA44 (SEQ ID NO: 1062); 2HFA52 (SEQ ID NO: 1063); 2HFA11 (SEQ ID NO: 1064); 2HFA4 (SEQ ID NO: 1065); 2HFA46 (SEQ ID NO: 1066); 2HFA10 (SEQ ID NO: 1067); 2HFA38 (SEQ ID NO: 1068); 2HFA20 (SEQ ID NO: 1069); 2HFA5 (SEQ ID NO: 1070); 2HFA19 (SEQ ID NO: 1071); 2HFA2 (SEQ ID NO: 1072); 2HFA41 (SEQ ID NO: 1073); 2HFA42 (SEQ ID NO: 1074); 2HFA12 (SEQ ID NO: 1075); 2HFA24 (SEQ ID NO: 1076); 2HFA67 (SEQ ID NO: 1077); 2HFA29 (SEQ ID NO: 1078); 2HFA51 (SEQ ID NO: 1079); 2HFA63 (SEQ ID NO: 1080); 2HFA62 (SEQ ID NO: 1081); 2HFA26 (SEQ ID NO: 1082); 2HFA25 (SEQ ID NO: 1083); 2HFA1 (SEQ ID NO: 1084); 2HFA3 (SEQ ID NO: 1085); 2HFA7 (SEQ ID NO: 1086); 2HFA31 (SEQ ID NO: 1087); 2HFA6 (SEQ ID NO: 1088); 2HFA53 (SEQ ID NO: 1089); 2HFA9 (SEQ ID NO: 1090); 2HFA73 (SEQ ID NO: 1091); 2HFA55 (SEQ ID NO: 1092); 2HFA71 (SEQ ID NO: 1093); 2HFA60 (SEQ ID NO: 1094); 2HFA65 (SEQ ID NO: 1095); 2HFA49 (SEQ ID NO: 1096); 2HFA57 (SEQ ID NO: 1097); 2HFA23 (SEQ ID NO: 1098); 2HFA36 (SEQ ID NO: 1099); 2HFA14 (SEQ ID NO: 1100); 2HFA43 (SEQ ID NO: 1101); and 2HFA50 (SEQ ID NO: 1102).

[0654] In some embodiments, the FAP targeting moiety comprises an amino acid sequence selected from SEQ ID NOs: 1062-1102 (provided above) without the terminal histidine tag sequence (i.e., HHHHHH; SEQ ID NO: 393).

[0655] In some embodiments, the FAP targeting moiety comprises an amino acid sequence selected from SEQ ID NOs: 1062-1102 (provided above) without the HA tag (i.e., YPYDVPDYGS; SEQ ID NO: 394).

[0656] In some embodiments, the FAP targeting moiety comprises an amino acid sequence selected from SEQ ID NOs: 1062-1102 (provided above) without the AAA linker (i.e., AAA).

[0657] In some embodiments, the FAP targeting moiety comprises an amino acid sequence selected from SEQ ID NOs: 1062-1102 (provided above) without the AAA linker, HA tag, and terminal histidine tag sequence (i.e., AAAYPYDVPDYGSHHHHHH; SEQ ID NO: 395).

[0658] By way of example, but not by way of limitation, in some embodiments, a human VHH FAP targeting moiety comprises an amino acid sequence selected from the following sequences: 2HFA44 (SEQ ID NO: 1103); 2HFA52 (SEQ ID NO: 1104); 2HFA11 (SEQ ID NO: 1105); 2HFA4 (SEQ ID NO: 1106); 2HFA46 (SEQ ID NO: 1107); 2HFA10 (SEQ ID NO: 1108); 2HFA38 (SEQ ID NO: 1109); 2HFA20 (SEQ ID NO: 1110); 2HFA5 (SEQ ID NO: 1111); 2HFA19 (SEQ ID NO: 1112); 2HFA2 (SEQ ID NO: 1113); 2HFA41 (SEQ ID NO: 1114); 2HFA42 (SEQ ID NO: 1115); 2HFA12 (SEQ ID NO: 1116); 2HFA24 (SEQ ID NO: 1117); 2HFA67 (SEQ ID NO: 1118); 2HFA29 (SEQ ID NO: 1119); 2HFA51 (SEQ ID NO: 1120); 2HFA63 (SEQ ID NO: 1121); 2HFA62 (SEQ ID NO: 1122); 2HFA26 (SEQ ID NO: 1123); 2HFA25 (SEQ ID NO: 1124); 2HFA1 (SEQ ID NO: 1125); 2HFA3 (SEQ ID NO: 1126); 2HFA7 (SEQ ID NO: 1127); 2HFA31 (SEQ ID NO: 1128); 2HFA6 (SEQ ID NO: 1129); 2HFA53 (SEQ ID NO: 1130); 2HFA9 (SEQ ID NO: 1131); 2HFA73 (SEQ ID NO: 1132); 2HFA55 (SEQ ID NO: 1133); 2HFA71 (SEQ ID NO: 1134); 2HFA60 (SEQ ID NO: 1135); 2HFA65 (SEQ ID NO: 1136); 2HFA49 (SEQ ID NO: 1137); 2HFA57 (SEQ ID NO: 1138); 2HFA23 (SEQ ID NO: 1139); 2HFA36 (SEQ ID NO: 1140); 2HFA14 (SEQ ID NO: 1141); 2HFA43 (SEQ ID NO: 1142); and 2HFA50 (SEQ ID NO: 1143).

[0659] In some embodiments, the FAP targeting moiety comprises a binding agent that is a VHH comprising a single amino acid chain having four “framework regions” or FRs and three “complementary determining regions” or CDRs.

[0660] As used herein, “framework region” or “FR” refers to a region in the variable domain which is located between the CDRs. As used herein, “complementary determining region” or “CDR” refers to variable regions in VHHs that contains the amino acid sequences capable of specifically binding to antigenic targets.

[0661] In some embodiments, the FAP targeting moiety comprises a VHH having a variable domain comprising at least one CDR1, CDR2, and/or CDR3 sequences. In some embodiments, the FAP targeting moiety comprises a VHH having a variable region comprising at least one FR1, FR2, FR3, and FR4 sequences.

[0662] In some embodiments, a human FAP targeting moiety comprises a CDR1 sequence selected from SEQ ID Nos: 1144-1172. In some embodiments, a human FAP targeting moiety comprises a CDR2 sequence selected from SEQ ID Nos: 1173-1201. In some embodiments, a human FAP targeting moiety comprises a CDR3 sequence selected from SEQ ID Nos.: 1202-1232.

[0663] In some embodiments, the FAP targeting moiety has at least 90% identity with any FAP amino acid sequence selected disclosed herein. In some embodiments, the FAP targeting moiety has about 90%, about 91%, about 92%, about 93%, about 94%, about 95%, about 96%, about 97%, about 98%, about 99% identity with any FAP amino acid sequence selected disclosed herein.

[0664] In various illustrative embodiments, the murine FAP targeting moiety has at least 90% identity with the amino acid sequence of sibrotuzumab.

[0665] In some embodiments, the present technology contemplates the use of any natural or synthetic analogs, mutants, variants, alleles, homologs and orthologs (herein collectively referred to as “analogs”) of the FAP targeting moieties as described herein. In some embodiments, the amino acid sequence of the FAP targeting moiety further includes an amino acid analog, an amino acid derivative, or other non-classical amino acids.

[0666] In some embodiments, the FAP targeting moiety comprises a sequence that is at least 60% identical to any one of the FAP sequences disclosed herein. For example, the FAP targeting moiety may comprise a sequence that is at least about 60%, at least about 61%, at least about 62%, at least about 63%, at least about 64%, at least about 65%, at least about 66%, at least about 67%, at least about 68%, at least about 69%, at least about 70%, at least about 71%, at least about 72%, at least about 73%, at least about 74%, at least about 75%, at least about 76%, at least about 77%, at least about 78%, at least about 79%, at least about 80%, at least about 81%, at least about 82%, at least about 83%, at least about 84%, at least about 85%, at least about 86%, at least about 87%, at least about 88%, at least about 89%, at least about 90%, at least about 91%, at least about 92%, at least about 93%, at least about 94%, at least about 95%, at least about 96%, at least about 97%, at least about 98%, at least about 99%, or 100% identical to any of the FAP sequences disclosed herein (e.g. about 60%, or about 61%, or about 62%, or about 63%, or about 64%, or about 65%, or about 66%, or about 67%, or about 68%, or about 69%, or about 70%, or about 71%, or about 72%, or about 73%, or about 74%, or about 75%, or about 76%, or about 77%, or about 78%, or about 79%, or about 80%, or about 81%, or about 82%, or about 83%, or about 84%, or about 85%, or about 86%, or about 87%, or about 88%, or about 89%, or about 90%, or about 91%, or about 92%, or about 93%, or about 94%, or about 95%, or about 96%, or about 97%, or about 98%, about 99% or about 100% sequence identity to any one of the FAP sequences disclosed herein).

[0667] In some embodiments, the FAP targeting moiety comprises an amino acid sequence having one or more amino acid mutations with respect to any one of the sequences disclosed herein. In some embodiments, the FAP targeting moiety comprises an amino acid sequence having one, or two, or three, or four, or five, or six, or seen, or eight, or nine, or ten, or fifteen, or twenty amino acid mutations with respect to any one of the sequences disclosed herein.

[0668] In some embodiments, the one or more amino acid mutations may be independently selected from substitutions, insertions, deletions, and truncations.

[0669] In some embodiments, the amino acid mutations are amino acid substitutions, and may include conservative and/or non-conservative substitutions.

[0670] “Conservative substitutions” may be made, for instance, on the basis of similarity in polarity, charge, size, solubility, hydrophobicity, hydrophilicity, and/or the amphipathic nature of the amino acid residues involved. The 20 naturally occurring amino acids can be grouped into the following six standard amino acid groups: (1) hydrophobic: Met, Ala, Val, Leu, Ile; (2) neutral hydrophilic: Cys, Ser, Thr; Asn, Gln; (3) acidic: Asp, Glu; (4) basic: His, Lys, Arg; (5) residues that influence chain orientation: Gly, Pro; and (6) aromatic: Trp, Tyr, Phe.

[0671] As used herein, “conservative substitutions” are defined as exchanges of an amino acid by another amino acid listed within the same group of the six standard amino acid groups shown above. For example, the exchange of Asp by Glu retains one negative charge in the so modified polypeptide. In addition, glycine and proline may be substituted for one another based on their ability to disrupt α-helices.

[0672] As used herein, “non-conservative substitutions” are defined as exchanges of an amino acid by another amino acid listed in a different group of the six standard amino acid groups (1) to (6) shown above.

[0673] In some embodiments, the substitutions include non-classical amino acids. Illustrative non-classical amino acids include, but are not limited to, selenocysteine, pyrrolysine, N-formylmethionine β-alanine, GABA and δ-Aminolevulinic acid, 4-aminobenzoic acid (PABA), D-isomers of the common amino acids, 2,4-diaminobutyric acid, α-amino isobutyric acid, 4-aminobutyric acid, Abu, 2-amino butyric acid, γ-Abu, ε-Ahx, 6-amino hexanoic acid, Aib, 2-amino isobutyric acid, 3-amino propionic acid, ornithine, norleucine, norvaline, hydroxyproline, sarcosme, citrulline, homocitrulline, cysteic acid, t-butylglycine, t-butylalanine, phenylglycine, cyclohexylalanine, β-alanine, fluoro-amino acids, designer amino acids such as β methyl amino acids, C α-methyl amino acids, N α-methyl amino acids, and amino acid analogs in general.

[0674] In some embodiments, one or more amino acid mutations are in the CDRs of the FAP targeting moiety (e.g., the CDR1, CDR2 or CDR3 regions). In another embodiment, one or more amino acid mutations are in the framework regions (FRs) of the targeting moiety (e.g., the FR1, FR2, FR3, or FR4 regions).

[0675] Modification of the amino acid sequences may be achieved using any known technique in the art e.g., site-directed mutagenesis or PCR based mutagenesis. Such techniques are described, for example, in Sambrook et al., Molecular Cloning: A Laboratory Manual, Cold Spring Harbor Press, Plainview, N.Y., 1989 and Ausubel et al., Current Protocols in Molecular Biology, John Wiley & Sons, New York, N.Y., 1989.

[0676] In some embodiments, the mutations do not substantially reduce the FAP targeting moiety's capability to specifically bind to FAP. In some embodiments, the mutations do not substantially reduce the present FAP targeting moiety's capability to specifically bind to FAP and without functionally modulating (e.g., partially or fully neutralizing) FAP.

[0677] In some embodiments, the binding affinity of the FAP targeting moiety for the full-length and/or mature forms and/or isoforms and/or splice variants and/or fragments and/or monomeric and/or dimeric forms and/or any other naturally occurring or synthetic analogs, variants, or mutants (including monomeric and/or dimeric forms) of human FAP may be described by the equilibrium dissociation constant (K_{D}). In some embodiments, the FAP targeting moiety binds to the full-length and/or mature forms and/or isoforms and/or splice variants and/or fragments and/or any other naturally occurring or synthetic analogs, variants, or mutants (including monomeric and/or dimeric forms) of human FAP with a K_{D} of less than about 1 μM, about 900 nM, about 800 nM, about 700 nM, about 600 nM, about 500 nM, about 400 nM, about 300 nM, about 200 nM, about 100 nM, about 90 nM, about 80 nM, about 70 nM, about 60 nM, about 50 nM, about 40 nM, about 30 nM, about 20 nM, about 10 nM, or about 5 nM, or about 1 nM.

[0678] In some embodiments, the FAP targeting moiety binds but does not functionally modulate (e.g., partially or fully neutralize) the antigen of interest, i.e., FAP. For instance, in some embodiments, the FAP targeting moiety simply targets the antigen but does not substantially functionally modulate (e.g. partially or fully inhibit, reduce or neutralize) a biological effect that the antigen has. In some embodiments, the FAP targeting moiety binds an epitope that is physically separate from an antigen site that is important for its biological activity (e.g. an antigen's active site).

[0679] Such binding without significant function modulation finds use in some embodiments of the present technology, including methods in which the FAP targeting moiety is used to directly or indirectly recruit active immune cells to a site of need via an effector antigen. For example, in some embodiments, the FAP targeting moiety can be used to directly or indirectly recruit dendritic cells via FAP to a tumor cell in a method of reducing or eliminating a tumor (e.g. the FAP targeting moiety may comprise a binding agent having an anti-FAP antigen recognition domain and a targeting moiety having a recognition domain (e.g. antigen recognition domain) directed against a tumor antigen or receptor). In such embodiments, it is desirable to directly or indirectly recruit dendritic cells but not to functionally modulate or neutralize the FAP activity. In these embodiments, FAP signaling is an important piece of the tumor reducing or eliminating effect.

[0680] In some embodiments, the FAP targeting moiety enhances antigen-presentation by dendritic cells. For example, in some embodiments, the FAP targeting moiety directly or indirectly recruits dendritic cells via FAP to a tumor cell, where tumor antigens are subsequently endocytosed and presented on the dendritic cell for induction of potent humoral and cytotoxic T cell responses.

[0681] In other embodiments (for example, related to treating cancer, autoimmune, or neurodegenerative disease), the FAP targeting moiety comprises a binding agent that binds and neutralizes the antigen of interest, i.e., FAP. For instance, in some embodiments, the present methods may inhibit or reduce FAP signaling or expression, e.g. to cause a reduction in an immune response.

### XCR1 Targeting Moieties

[0682] In some embodiments, the targeting moiety is an XCR1 targeting moiety that is capable of specific binding to XCR1. In various embodiments, the XCR1 targeting moiety is a protein-based agent capable of specific binding to XCR1 without functional modulation (e.g., partial or full neutralization) of XCR1. XCR1 is a chemokine receptor belonging to the G protein-coupled receptor superfamily. The family members are characterized by the presence of 7 transmembrane domains and numerous conserved amino acids. XCR1 is most closely related to RBS11 and the MIP1-alpha/RANTES receptor. XCR1 transduces a signal by increasing the intracellular calcium ions level. XCR1 is the receptor for XCL1 and XCL2 (or lymphotactin-1 and -2).

[0683] In some embodiments, the XCR1 targeting moiety comprises an antigen recognition domain that recognizes an epitope present on XCR1. In some embodiments, the antigen-recognition domain recognizes one or more linear epitopes present on XCR1. In some embodiment, a linear epitope refers to any continuous sequence of amino acids present on XCR1. In another embodiment, the antigen-recognition domain recognizes one or more conformational epitopes present on XCR1. As used herein, a conformation epitope refers to one or more sections of amino acids (which may be discontinuous) which form a three-dimensional surface with features and/or shapes and/or tertiary structures capable of being recognized by an antigen recognition domain.

[0684] In some embodiments, the XCR1 targeting moiety can bind to the full-length and/or mature forms and/or isoforms and/or splice variants and/or fragments and/or any other naturally occurring or synthetic analogs, variants, or mutants of human XCR1. In various embodiments, the XCR1 targeting moiety can bind to any forms of the human XCR1, including monomeric, dimeric, heterodimeric, multimeric and associated forms. In an embodiment, the Fc-based chimeric protein complex binds to the monomeric form of XCR1. In another embodiment, the XCR1 targeting moiety binds to a dimeric form of XCR1. In a further embodiment, the XCR1 targeting moiety binds to glycosylated form of XCR1, which may be either monomeric or dimeric.

[0685] In an embodiment, the XCR1 targeting moiety comprises an antigen recognition domain that recognizes one or more epitopes present on human XCR1. In an embodiment, the human XCR1 comprises the amino acid sequence of SEQ ID NO: 1233.

[0686] In various embodiments, the XCR1 targeting moiety is capable of specific binding. In various embodiments, the XCR1 targeting moiety comprises an antigen recognition domain such as an antibody or derivatives thereof.

[0687] In some embodiments, the XCR1 targeting moiety comprises an antibody derivative or format. In some embodiments, the XCR1 targeting moiety comprises a single-domain antibody, a recombinant heavy-chain-only antibody (VHH), a single-chain antibody (scFv), a shark heavy-chain-only antibody (VNAR), a microprotein (cysteine knot protein, knottin), a DARPin; a Tetranectin; an Affibody; an Affimer, a Transbody; an Anticalin; an AdNectin; an alphabody; a bicyclic peptide; an Affilin; a Microbody; a peptide aptamer; an alterase; a plastic antibody; a phylomer; a stradobody; a maxibody; an evibody; a fynomer, an armadillo repeat protein, a Kunitz domain, an avimer, an atrimer, a probody, an immunobody, a triomab, a troybody; a pepbody; a vaccibody, a UniBody; a DuoBody, a Fv, a Fab, a Fab′, a F(ab′)2, a peptide mimetic molecule, or a small (e.g. synthetic or natural) molecule, e.g. without limitation, as described in Patent Publication Nos. or U.S. Pat. No. 7,417,130, US 2004/132094, U.S. Pat. No. 5,831,012, US 2004/023334, U.S. Pat. Nos. 7,250,297, 6,818,418, US 2004/209243, U.S. Pat. Nos. 7,838,629, 7,186,524, 6,004,746, 5,475,096, US 2004/146938, US 2004/157209, U.S. Pat. Nos. 6,994,982, 6,794,144, US 2010/239633, U.S. Pat. No. 7,803,907, US 2010/119446, and/or U.S. Pat. No. 7,166,697, the contents of which are hereby incorporated by reference in their entireties. See also, Storz MAbs. 2011 May-June; 3(3): 310-317.

[0688] In some embodiments, the XCR1 targeting moiety comprises a single-domain antibody, such as a VHH. The VHH may be derived from, for example, an organism that produces VHH antibody such as a camelid, a shark, or the VHH may be a designed VHH. VHHs are antibody-derived therapeutic proteins that contain the unique structural and functional properties of naturally-occurring heavy-chain antibodies. VHH technology is based on fully functional antibodies from camelids that lack light chains. These heavy-chain antibodies contain a single variable domain (V_{H}H) and two constant domains (CH2 and CH3). In an embodiment, the Fc-based chimeric protein complex comprises a VHH.

[0689] In some embodiments, the XCR1 targeting moiety comprises a VHH comprising a single amino acid chain having four “framework regions” or FRs and three “complementary determining regions” or CDRs. As used herein, “framework region” or “FR” refers to a region in the variable domain which is located between the CDRs. As used herein, “complementary determining region” or “CDR” refers to variable regions in VHHs that contains the amino acid sequences capable of specifically binding to antigenic targets.

[0690] In some embodiments, the XCR1 targeting moiety comprises a VHH having a variable domain comprising at least one CDR1, CDR2, and/or CDR3 sequences. In various embodiments, the XCR1 targeting moiety comprises a VHH having a variable region comprising at least one FR1, FR2, FR3, and FR4 sequences.

[0691] In some embodiments, the present invention contemplates the use of any natural or synthetic analogs, mutants, variants, alleles, homologs and orthologs (herein collectively referred to as “analogs”) of the XCR1 targeting moieties described herein. In various embodiments, the amino acid sequence of the XCR1 targeting moiety further includes an amino acid analog, an amino acid derivative, or other non-classical amino acids.

[0692] In some embodiments, the XCR1 targeting moiety comprises a sequence that is at least 60% identical to any one of the XCR1sequences disclosed herein. For example, the XCR1 targeting moiety may comprise a sequence that is at least about 60%, at least about 61%, at least about 62%, at least about 63%, at least about 64%, at least about 65%, at least about 66%, at least about 67%, at least about 68%, at least about 69%, at least about 70%, at least about 71%, at least about 72%, at least about 73%, at least about 74%, at least about 75%, at least about 76%, at least about 77%, at least about 78%, at least about 79%, at least about 80%, at least about 81%, at least about 82%, at least about 83%, at least about 84%, at least about 85%, at least about 86%, at least about 87%, at least about 88%, at least about 89%, at least about 90%, at least about 91%, at least about 92%, at least about 93%, at least about 94%, at least about 95%, at least about 96%, at least about 97%, at least about 98%, at least about 99%, or 100% identical to any of the XCR1 sequences disclosed herein (e.g. about 60%, or about 61%, or about 62%, or about 63%, or about 64%, or about 65%, or about 66%, or about 67%, or about 68%, or about 69%, or about 70%, or about 71%, or about 72%, or about 73%, or about 74%, or about 75%, or about 76%, or about 77%, or about 78%, or about 79%, or about 80%, or about 81%, or about 82%, or about 83%, or about 84%, or about 85%, or about 86%, or about 87%, or about 88%, or about 89%, or about 90%, or about 91%, or about 92%, or about 93%, or about 94%, or about 95%, or about 96%, or about 97%, or about 98%, about 99% or about 100% sequence identity to any one of the XCR1 sequences disclosed herein).

[0693] In some embodiments, the XCR1 targeting moiety comprises an amino acid sequence having one or more amino acid mutations with respect to any one of the sequences disclosed herein. In various embodiments, the XCR1 targeting moiety comprises an amino acid sequence having one, or two, or three, or four, or five, or six, or seen, or eight, or nine, or ten, or fifteen, or twenty amino acid mutations with respect to any one of the sequences disclosed herein. In some embodiments, the one or more amino acid mutations may be independently selected from substitutions, insertions, deletions, and truncations.

[0694] In some embodiments, the amino acid mutations are amino acid substitutions, and may include conservative and/or non-conservative substitutions.

[0695] “Conservative substitutions” may be made, for instance, on the basis of similarity in polarity, charge, size, solubility, hydrophobicity, hydrophilicity, and/or the amphipathic nature of the amino acid residues involved. The 20 naturally occurring amino acids can be grouped into the following six standard amino acid groups: (1) hydrophobic: Met, Ala, Val, Leu, Ile; (2) neutral hydrophilic: Cys, Ser, Thr; Asn, Gln; (3) acidic: Asp, Glu; (4) basic: His, Lys, Arg; (5) residues that influence chain orientation: Gly, Pro; and (6) aromatic: Trp, Tyr, Phe.

[0696] As used herein, “conservative substitutions” are defined as exchanges of an amino acid by another amino acid listed within the same group of the six standard amino acid groups shown above. For example, the exchange of Asp by Glu retains one negative charge in the so modified polypeptide. In addition, glycine and proline may be substituted for one another based on their ability to disrupt α-helices.

[0697] As used herein, “non-conservative substitutions” are defined as exchanges of an amino acid by another amino acid listed in a different group of the six standard amino acid groups (1) to (6) shown above.

[0698] In various embodiments, the substitutions may also include non-classical amino acids. Exemplary non-classical amino acids include, but are not limited to, selenocysteine, pyrrolysine, N-formylmethionine β-alanine, GABA and δ-Aminolevulinic acid, 4-aminobenzoic acid (PABA), D-isomers of the common amino acids, 2,4-diaminobutyric acid, α-amino isobutyric acid, 4-aminobutyric acid, Abu, 2-amino butyric acid, γ-Abu, ε-Ahx, 6-amino hexanoic acid, Aib, 2-amino isobutyric acid, 3-amino propionic acid, ornithine, norleucine, norvaline, hydroxyproline, sarcosme, citrulline, homocitrulline, cysteic acid, t-butylglycine, t-butylalanine, phenylglycine, cyclohexylalanine, β-alanine, fluoro-amino acids, designer amino acids such as β methyl amino acids, C α-methyl amino acids, N α-methyl amino acids, and amino acid analogs in general.

[0699] In various embodiments, the amino acid mutation may be in the CDRs of the targeting moiety (e.g., the CDR1, CDR2 or CDR3 regions). In another embodiment, amino acid alteration may be in the framework regions (FRs) of the targeting moiety (e.g., the FR1, FR2, FR3, or FR4 regions).

[0700] Modification of the amino acid sequences may be achieved using any known technique in the art e.g., site-directed mutagenesis or PCR based mutagenesis. Such techniques are described, for example, in Sambrook et al., Molecular Cloning: A Laboratory Manual, Cold Spring Harbor Press, Plainview, N.Y., 1989 and Ausubel et al., Current Protocols in Molecular Biology, John Wiley & Sons, New York, N.Y., 1989.

[0701] In various embodiments, the mutations do not substantially reduce the XCR1 targeting moiety's capability to specifically bind to XCR1. In various embodiments, the mutations do not substantially reduce the XCR1 targeting moiety's capability to specifically bind to XCR1 and without functionally modulating (e.g., partially or fully neutralizing) XCR1.

[0702] In various embodiments, the binding affinity of the XCR1 targeting moiety for the full-length and/or mature forms and/or isoforms and/or splice variants and/or fragments and/or monomeric and/or dimeric forms and/or any other naturally occurring or synthetic analogs, variants, or mutants (including monomeric and/or dimeric forms) of human XCR1 may be described by the equilibrium dissociation constant (K_{D}). In various embodiments, the Fc-based chimeric protein complex comprises a targeting moiety that binds to the full-length and/or mature forms and/or isoforms and/or splice variants and/or fragments and/or any other naturally occurring or synthetic analogs, variants, or mutants (including monomeric and/or dimeric forms) of human XCR1 with a K_{D} of less than about 1 uM, about 900 nM, about 800 nM, about 700 nM, about 600 nM, about 500 nM, about 400 nM, about 300 nM, about 200 nM, about 100 nM, about 90 nM, about 80 nM, about 70 nM, about 60 nM, about 50 nM, about 40 nM, about 30 nM, about 20 nM, about 10 nM, or about 5 nM, or about 1 nM.

[0703] In various embodiments, the XCR1 targeting moiety binds but does not functionally modulate (e.g., partially or fully neutralize) the antigen of interest, i.e., XCR1. For instance, in various embodiments, the XCR1 targeting moiety simply targets the antigen but does not substantially functionally modulate (e.g. partially or fully inhibit, reduce or neutralize) a biological effect that the antigen has. In various embodiments, the XCR1 targeting moiety binds an epitope that is physically separate from an antigen site that is important for its biological activity (e.g. an antigen's active site).

[0704] Such binding without significant function modulation finds use in various embodiments of the present invention, including methods in which the XCR1 targeting moiety is used to directly or indirectly recruit active immune cells to a site of need via an effector antigen. For example, in various embodiments, the XCR1 targeting moiety can be used to directly or indirectly recruit dendritic cells via XCR1 to a tumor cell in a method of reducing or eliminating a tumor (e.g. the XCR1 targeting moiety can comprise a binding agent having an anti-XCR1 antigen recognition domain and a targeting moiety having a recognition domain (e.g. antigen recognition domain) directed against a tumor antigen or receptor). In such embodiments, it is desirable to directly or indirectly recruit dendritic cells but not to functionally modulate or neutralize the XCR1 activity. In these embodiments, XCR1 signaling is an important piece of the tumor reducing or eliminating effect.

[0705] In some embodiments, the XCR1 targeting moiety enhances antigen-presentation by dendritic cells. For example, in various embodiments, the XCR1 targeting moiety directly or indirectly recruits dendritic cells via XCR1 to a tumor cell, where tumor antigens are subsequently endocytosed and presented on the dendritic cell for induction of potent humoral and cytotoxic T cell responses.

[0706] In other embodiments (for example, related to treating autoimmune or neurodegenerative disease), the XCR1 targeting moiety comprises a binding agent that binds and neutralizes the antigen of interest, i.e., XCR1. For instance, in various embodiments, the present methods may inhibit or reduce XCR1 signaling or expression, e.g. to cause a reduction in an immune response.

### Non-Cellular Structure Targeting Moieties

[0707] In some embodiments, the targeting moiety's target (e.g. antigen or receptor) is part of a non-cellular structure. In some embodiments, the antigen or receptor is not an integral component of an intact cell or cellular structure. In some embodiments, the antigen or receptor is an extracellular antigen or receptor. In some embodiments, the target is a non-proteinaceous, non-cellular marker, including, without limitation, nucleic acids, inclusive of DNA or RNA, such as, for example, DNA released from necrotic tumor cells or extracellular deposits such as cholesterol.

[0708] In some embodiments, the target of interest (e.g. antigen, receptor) is part of the non-cellular component of the stroma or the extracellular matrix (ECM) or the markers associated therewith. As used herein, stroma refers to the connective and supportive framework of a tissue or organ. Stroma may include a compilation of cells such as fibroblasts/myofibroblasts, glial, epithelia, fat, immune, vascular, smooth muscle, and immune cells along with the extracellular matrix (ECM) and extracellular molecules. In various embodiments, the target (e.g. antigen, receptor) of interest is part of the non-cellular component of the stroma such as the extracellular matrix and extracellular molecules. As used herein, the ECM refers to the non-cellular components present within all tissues and organs. The ECM is composed of a large collection of biochemically distinct components including, without limitation, proteins, glycoproteins, proteoglycans, and polysaccharides. These components of the ECM are usually produced by adjacent cells and secreted into the ECM via exocytosis. Once secreted, the ECM components often aggregate to form a complex network of macromolecules. In various embodiments, the Fc-based chimeric protein complex of the invention comprises a targeting moiety that recognizes a target (e.g., an antigen or receptor or non-proteinaceous molecule) located on any component of the ECM. Illustrative components of the ECM include, without limitation, the proteoglycans, the non-proteoglycan polysaccharides, fibers, and other ECM proteins or ECM non-proteins, e.g. polysaccharides and/or lipids, or ECM associated molecules (e.g. proteins or non-proteins, e.g. polysaccharides, nucleic acids and/or lipids).

[0709] In some embodiments, the targeting moiety recognizes a target (e.g. antigen, receptor) on ECM proteoglycans. Proteoglycans are glycosylated proteins. The basic proteoglycan unit includes a core protein with one or more covalently attached glycosaminoglycan (GAG) chains. Proteoglycans have a net negative charge that attracts positively charged sodium ions (Na+), which attracts water molecules via osmosis, keeping the ECM and resident cells hydrated. Proteoglycans may also help to trap and store growth factors within the ECM. Illustrative proteoglycans that may be targeted by the Fc-based chimeric protein complexes of the invention include, but are not limited to, heparan sulfate, chondroitin sulfate, and keratan sulfate. In an embodiment, the targeting moiety recognizes a target (e.g. antigen, receptor) on non-proteoglycan polysaccharides such as hyaluronic acid.

[0710] In some embodiments, the targeting moiety recognizes a target (e.g. antigen, receptor) on ECM fibers. ECM fibers include collagen fibers and elastin fibers. In some embodiments, the targeting moiety recognizes one or more epitopes on collagens or collagen fibers. Collagens are the most abundant proteins in the ECM. Collagens are present in the ECM as fibrillar proteins and provide structural support to resident cells. In one or more embodiments, the targeting moiety recognizes and binds to various types of collagens present within the ECM including, without limitation, fibrillar collagens (types I, II, III, V, XI), facit collagens (types IX, XII, XIV), short chain collagens (types VIII, X), basement membrane collagens (type IV), and/or collagen types VI, VII, or XIII. Elastin fibers provide elasticity to tissues, allowing them to stretch when needed and then return to their original state. In some embodiments, the target moiety recognizes one or more epitopes on elastins or elastin fibers.

[0711] In some embodiments, the targeting moiety recognizes one or more ECM proteins including, but not limited to, a tenascin, a fibronectin, a fibrin, a laminin, or a nidogen/entactin.

[0712] In an embodiment, the targeting moiety recognizes and binds to tenascin. The tenascin (TN) family of glycoproteins includes at least four members, tenascin-C, tenascin-R, tenascin-X, and tenascin W. The primary structures of tenascin proteins include several common motifs ordered in the same consecutive sequence: amino-terminal heptad repeats, epidermal growth factor (EGF)-like repeats, fibronectin type III domain repeats, and a carboxyl-terminal fibrinogen-like globular domain. Each protein member is associated with typical variations in the number and nature of EGF-like and fibronectin type III repeats. Isoform variants also exist particularly with respect to tenascin-C. Over 27 splice variants and/or isoforms of tenascin-C are known. In a particular embodiment, the targeting moiety recognizes and binds to tenascin-CA1. Similarly, tenascin-R also has various splice variants and isoforms. Tenascin-R usually exists as dimers or trimers. Tenascin-X is the largest member of the tenascin family and is known to exist as trimers. Tenascin-W exists as trimers. In some embodiments, the targeting moiety recognizes one or more epitopes on a tenascin protein. In some embodiments, the targeting moiety recognizes the monomeric and/or the dimeric and/or the trimeric and/or the hexameric forms of a tenascin protein.

[0713] In some embodiments, the targeting moiety recognizes tenascin-CA1.

[0714] In some embodiments, the targeting moieties recognize and bind to fibronectin. Fibronectins are glycoproteins that connect cells with collagen fibers in the ECM, allowing cells to move through the ECM. Upon binding to integrins, fibronectins unfolds to form functional dimers. In some embodiments, the targeting moiety recognizes the monomeric and/or the dimeric forms of fibronectin. In some embodiments, the targeting moiety recognizes one or more epitopes on fibronectin. In illustrative embodiments, the targeting moiety recognizes fibronectin extracellular domain A (EDA) or fibronectin extracellular domain B (EDB). Elevated levels of EDA are associated with various diseases and disorders including psoriasis, rheumatoid arthritis, diabetes, and cancer. In some embodiments, the targeting moiety recognizes fibronectin that contains the EDA isoform and may be utilized to target the Fc-based chimeric protein complex to diseased cells including cancer cells. In some embodiments, the targeting moiety recognizes fibronectin that contains the EDB isoform. In various embodiments, such targeting moieties may be utilized to target the Fc-based chimeric protein complex to tumor cells including the tumor neovasculature.

[0715] In an embodiment, the targeting moiety recognizes and binds to fibrin. Fibrin is another protein substance often found in the matrix network of the ECM. Fibrin is formed by the action of the protease thrombin on fibrinogen which causes the fibrin to polymerize. In some embodiments, the targeting moiety recognizes one or more epitopes on fibrin. In some embodiments, the targeting moiety recognizes the monomeric as well as the polymerized forms of fibrin.

[0716] In an embodiment, the targeting moiety recognizes and binds to laminin. Laminin is a major component of the basal lamina, which is a protein network foundation for cells and organs. Laminins are heterotrimeric proteins that contain an α-chain, a β-chain, and a γ-chain. In some embodiments, the targeting moiety recognizes one or more epitopes on laminin. In some embodiments, the targeting moiety recognizes the monomeric, the dimeric as well as the trimeric forms of laminin.

[0717] In an embodiment, the targeting moiety recognizes and binds to a nidogen or entactin. Nidogens/entactins are a family of highly conserved, sulfated glycoproteins. They make up the major structural component of the basement membranes and function to link laminin and collagen IV networks in basement membranes. Members of this family include nidogen-1 and nidogen-2. In various embodiments, the targeting moiety recognizes an epitope on nidogen-1 and/or nidogen-2.

[0718] In various embodiments, the targeting moiety comprises an antigen recognition domain that recognizes an epitope present on any of the targets described herein. In an embodiment, the antigen-recognition domain recognizes one or more linear epitopes present on the protein. As used herein, a linear epitope refers to any continuous sequence of amino acids present on the protein. In another embodiment, the antigen-recognition domain recognizes one or more conformational epitopes present on the protein. As used herein, a conformation epitope refers to one or more sections of amino acids (which may be discontinuous) which form a three-dimensional surface with features and/or shapes and/or tertiary structures capable of being recognized by an antigen recognition domain.

[0719] In various embodiments, the targeting moiety may bind to the full-length and/or mature forms and/or isoforms and/or splice variants and/or fragments and/or any other naturally occurring or synthetic analogs, variants, or mutants of any of the targets described herein. In various embodiments, the targeting moiety may bind to any forms of the proteins described herein, including monomeric, dimeric, trimeric, tetrameric, heterodimeric, multimeric and associated forms. In various embodiments, the targeting moiety may bind to any post-translationally modified forms of the proteins described herein, such as glycosylated and/or phosphorylated forms.

[0720] In various embodiments, the targeting moiety comprises an antigen recognition domain that recognizes extracellular molecules such as DNA. In some embodiments, the targeting moiety comprises an antigen recognition domain that recognizes DNA. In an embodiment, the DNA is shed into the extracellular space from necrotic or apoptotic tumor cells or other diseased cells.

[0721] In some embodiments, the targeting moiety comprises an antigen recognition domain that recognizes one or more non-cellular structures associated with atherosclerotic plaques. Two types of atherosclerotic plaques are known. The fibro-lipid (fibro-fatty) plaque is characterized by an accumulation of lipid-laden cells underneath the intima of the arteries. Beneath the endothelium there is a fibrous cap covering the atheromatous core of the plaque. The core includes lipid-laden cells (macrophages and smooth muscle cells) with elevated tissue cholesterol and cholesterol ester content, fibrin, proteoglycans, collagen, elastin, and cellular debris. In advanced plaques, the central core of the plaque usually contains extracellular cholesterol deposits (released from dead cells), which form areas of cholesterol crystals with empty, needle-like clefts. At the periphery of the plaque are younger foamy cells and capillaries. A fibrous plaque is also localized under the intima, within the wall of the artery resulting in thickening and expansion of the wall and, sometimes, spotty localized narrowing of the lumen with some atrophy of the muscular layer. The fibrous plaque contains collagen fibers (eosinophilic), precipitates of calcium (hematoxylinophilic) and lipid-laden cells. In some embodiments, the targeting moiety recognizes and binds to one or more of the non-cellular components of these plaques such as the fibrin, proteoglycans, collagen, elastin, cellular debris, and calcium or other mineral deposits or precipitates. In some embodiments, the cellular debris is a nucleic acid, e.g. DNA or RNA, released from dead cells.

[0722] In various embodiments, the targeting moiety comprises an antigen recognition domain that recognizes one or more non-cellular structures found in the brain plaques associated with neurodegenerative diseases. In some embodiments, the targeting moiety recognizes and binds to one or more non-cellular structures located in the amyloid plaques found in the brains of patients with Alzheimer's disease. For example, the targeting moiety may recognize and bind to the peptide amyloid beta, which is a major component of the amyloid plaques. In some embodiments, the targeting moiety recognizes and binds to one or more non-cellular structures located in the brains plaques found in patients with Huntington's disease. In various embodiments, the targeting moiety recognizes and binds to one or more non-cellular structures found in plaques associated with other neurodegenerative or musculoskeletal diseases such as Lewy body dementia and inclusion body myositis

[0723] In some embodiments, the targeting moiety is a protein-based agent capable of specific binding, such as an antibody or derivatives thereof.

### CD3 Targeting Moieties

[0724] In some embodiments, the present Fc-based chimeric protein complex has one or more targeting moieties directed against CD3 expressed on T cells. In some embodiments, the Fc-based chimeric protein complex has one or more targeting moieties which selectively bind a CD3 polypeptide. In some embodiments, the Fc-based chimeric protein complex comprises one or more antibodies, antibody derivatives or formats, peptides or polypeptides, or fusion proteins that selectively bind a CD3 polypeptide.

[0725] In some embodiments, the targeting moiety comprises the anti-CD3 antibody muromonab-CD3 (aka Orthoclone OKT3), or fragments thereof. Muromonab-CD3 is disclosed in U.S. Pat. No. 4,361,549 and Wilde et al. (1996) 51:865-894, the entire disclosures of which are hereby incorporated by reference. In illustrative embodiments, muromonab-CD3 or an antigen-binding fragment thereof for use in the methods provided herein comprises a heavy chain comprising the amino acid sequence of SEQ ID NO: 1234; and/or a light chain comprising the amino acid sequence of SEQ ID NO: 1235.

[0726] In some embodiments, the targeting moiety comprises the anti-CD3 antibody otelixizumab, or fragments thereof. Otelixizumab is disclosed in U.S. Patent Publication No. 20160000916 and Chatenoud et al. (2012) 9:372-381, the entire disclosures of which are hereby incorporated by reference. In illustrative embodiments, otelixizumab or an antigen-binding fragment thereof for use in the methods provided herein comprises a heavy chain comprising the amino acid sequence of SEQ ID NO: 1236; and/or a light chain comprising the amino acid sequence of SEQ ID NO: 1237.

[0727] In some embodiments, the targeting moiety comprises the anti-CD3 antibody teplizumab (AKA MGA031 and hOKT3γ1(Ala-Ala)), or fragments thereof. Teplizumab is disclosed in Chatenoud et al. (2012) 9:372-381, the entire disclosures of which are hereby incorporated by reference. In illustrative embodiments, teplizumab or an antigen-binding fragment thereof for use in the methods provided herein comprises a heavy chain comprising the amino acid sequence of SEQ ID NO: 1238; and/or a light chain comprising the amino acid sequence of SEQ ID NO: 1239.

[0728] In some embodiments, the targeting moiety comprises the anti-CD3 antibody visilizumab (AKA Nuvion®; HuM291), or fragments thereof. Visilizumab is disclosed in U.S. Pat. No. 5,834,597 and WO2004052397, and Cole et al., Transplantation (1999) 68:563-571, the entire disclosures of which are hereby incorporated by reference. In illustrative embodiments, visilizumab or an antigen-binding fragment thereof for use in the methods provided herein comprises a heavy chain variable region comprising the amino acid sequence of SEQ ID NO: 1240; and/or a light chain variable region comprising the amino acid sequence of SEQ ID NO: 1241.

[0729] In some embodiments, the targeting moiety comprises the anti-CD3 antibody foralumab (aka NI-0401), or fragments thereof. In various embodiments, the targeting moiety comprises any one of the anti-CD3 antibodies disclosed in US20140193399, U.S. Pat. No. 7,728,114, US20100183554, and U.S. Pat. No. 8,551,478, the entire disclosures of which are hereby incorporated by reference.

[0730] In illustrative embodiments, the anti-CD3 antibody or an antigen-binding fragment thereof for use in the methods provided herein comprises a heavy chain variable region comprising the amino acid sequence of SEQ ID Nos: 2 and 6 of U.S. Pat. No. 7,728,114 (SEQ ID NO: 1242 and 1243, respectively) and/or a light chain variable region comprising the amino acid sequence of SEQ ID NOs 4 and 8 of U.S. Pat. No. 7,728,114 (SEQ ID NO: 1244 and 1245).

[0731] In an embodiment, the targeting moiety comprises a heavy chain variable region comprising the amino acid sequence of SEQ ID NO:2 of U.S. Pat. No. 7,728,114 and a light chain variable region comprising the amino acid sequence of SEQ ID NO:4 of U.S. Pat. No. 7,728,114. In an embodiment, the targeting moiety comprises any one of the anti-CD3 antibodies disclosed in US2016/0168247, the entire contents of which are hereby incorporated by reference. In illustrative embodiments, the antibody or an antigen-binding fragment thereof for use in the methods provided herein comprises a heavy chain comprising an amino acid sequence selected from SEQ ID Nos: 6-9 of US2016/0168247 (SEQ ID Nos.: 1246-1249, respectively) and/or a light chain comprising an amino acid sequence selected from SEQ ID Nos: 10-12 of US2016/0168247 (SEQ ID Nos.: 1250-1252, respectively).

[0732] In an embodiment, the targeting moiety comprises any one of the anti-CD3 antibodies disclosed in US2015/0175699, the entire contents of which are hereby incorporated by reference. In illustrative embodiments, the antibody or an antigen-binding fragment thereof for use in the methods provided herein comprises a heavy chain comprising an amino acid sequence selected from SEQ ID No: 9 of US2015/0175699 (SEQ ID NO: 1253); and/or a light chain comprising an amino acid sequence selected from SEQ ID No: 10 of US2015/0175699 (SEQ ID NO: 1254).

[0733] In an embodiment, the targeting moiety comprises any one of the anti-CD3 antibodies disclosed in U.S. Pat. No. 8,784,821, the entire contents of which are hereby incorporated by reference. In illustrative embodiments, the antibody or an antigen-binding fragment thereof for use in the methods provided herein comprises a heavy chain comprising an amino acid sequence selected from SEQ ID Nos: 2, 18, 34, 50, 66, 82, 98 and 114 of U.S. Pat. No. 8,784,821 (SEQ ID Nos.: 1255, 1256, 1257, 1258, 1259, 1260, 1261, and 1262, respectively); and/or a light chain comprising an amino acid sequence selected from SEQ ID Nos: 10, 26, 42, 58, 74, 90, 106 and 122 of U.S. Pat. No. 8,784,821 (SEQ ID No.: 1263, 1264, 1265, 1266, 1267, 1268, 1269, and 1270, respectively).

[0734] In an embodiment, the targeting moiety comprises any one of the anti-CD3 binding constructs disclosed in US20150118252, the entire contents of which are hereby incorporated by reference. In illustrative embodiments, the antibody or an antigen-binding fragment thereof for use in the methods provided herein comprises a heavy chain comprising an amino acid sequence selected from SEQ ID Nos: 6 and 86 of US20150118252 (SEQ ID NO: 1271 and 1272, respectively); and/or a light chain comprising an amino acid sequence selected from SEQ ID No: 3 of US2015/0175699 (SEQ ID NO: 1273).

[0735] In an embodiment, the targeting moiety comprises any one of the anti-CD3 binding proteins disclosed in US2016/0039934, the entire contents of which are hereby incorporated by reference. In illustrative embodiments, the antibody or an antigen-binding fragment thereof for use in the methods provided herein comprises a heavy chain comprising an amino acid sequence selected from SEQ ID Nos: 6-9 of US2016/0039934 (SEQ ID Nos.: 1274-1277); and/or a light chain comprising an amino acid sequence selected from SEQ ID Nos: 1-4 of US2016/0039934 (SEQ ID Nos.: 1278-1281).

[0736] In various embodiments, the targeting moieties of the invention may comprise a sequence that targets CD3 which is at least about 60%, at least about 61%, at least about 62%, at least about 63%, at least about 64%, at least about 65%, at least about 66%, at least about 67%, at least about 68%, at least about 69%, at least about 70%, at least about 71%, at least about 72%, at least about 73%, at least about 74%, at least about 75%, at least about 76%, at least about 77%, at least about 78%, at least about 79%, at least about 80%, at least about 81%, at least about 82%, at least about 83%, at least about 84%, at least about 85%, at least about 86%, at least about 87%, at least about 88%, at least about 89%, at least about 90%, at least about 91%, at least about 92%, at least about 93%, at least about 94%, at least about 95%, at least about 96%, at least about 97%, at least about 98%, at least about 99%, or 100% identical to any of the sequences disclosed herein (e.g. about 60%, or about 61%, or about 62%, or about 63%, or about 64%, or about 65%, or about 66%, or about 67%, or about 68%, or about 69%, or about 70%, or about 71%, or about 72%, or about 73%, or about 74%, or about 75%, or about 76%, or about 77%, or about 78%, or about 79%, or about 80%, or about 81%, or about 82%, or about 83%, or about 84%, or about 85%, or about 86%, or about 87%, or about 88%, or about 89%, or about 90%, or about 91%, or about 92%, or about 93%, or about 94%, or about 95%, or about 96%, or about 97%, or about 98%, about 99% or about 100% sequence identity with any of the sequences disclosed herein).

[0737] In various embodiments, the targeting moieties of the invention may comprise any combination of heavy chain, light chain, heavy chain variable region, light chain variable region, complementarity determining region (CDR), and framework region sequences that target CD3 as disclosed herein. In various embodiments, the targeting moieties of the invention may comprise any heavy chain, light chain, heavy chain variable region, light chain variable region, complementarity determining region (CDR), and framework region sequences of the CD3-specific antibodies including, but not limited to, X35-3, VIT3, BMA030 (BW264/56), CLB-T3/3, CRIS7, YTH12.5, FI 11-409, CLB-T3.4.2, TR-66, WT32, SPv-T3b, 11D8, XIII-141, XIII-46, XIII-87, 12F6, T3/RW2-8C8, T3/RW2-4B6, OKT3D, M-T301, SMC2, WT31 and F101.01. These CD3-specific antibodies are well known in the art and, inter a/ia, described in Tunnacliffe (1989), Int. Immunol. 1, 546-550, the entire disclosures of which are hereby incorporated by reference.

[0738] Additional antibodies, antibody derivatives or formats, peptides or polypeptides, or fusion proteins that selectively bind or target CD3 are disclosed in US Patent Publication No. 2016/0000916, U.S. Pat. Nos. 4,361,549, 5,834,597, 6,491,916, 6,406,696, 6,143,297, 6,750,325 and International Publication No. WO 2004/052397, the entire disclosures of which are hereby incorporated by reference.

### CD20 Targeting Moieties

[0739] In various embodiments, the CD20 targeting moiety is a protein-based agent capable of specific binding to CD20. In various embodiments, the CD20 targeting moiety is a protein-based agent capable of specific binding to CD20 without neutralization of CD20. CD20 is a non-glycosylated member of the membrane-spanning 4-A (MS4A) family. It functions as a B cell specific differentiation antigen in both mouse and human. In particular, human CD20 cDNA encodes a transmembrane protein consisting of four hydrophobic membrane-spanning domains, two extracellular loops and intracellular N- and C-terminal regions.

[0740] In various embodiments, the CD20 targeting moiety comprises a targeting moiety having an antigen recognition domain that recognizes an epitope present on CD20. In an embodiment, the antigen-recognition domain recognizes one or more linear epitopes present on CD20. In some embodiments, a linear epitope refers to any continuous sequence of amino acids present on CD20. In another embodiment, the antigen-recognition domain recognizes one or more conformational epitopes present on CD20. As used herein, a conformation epitope refers to one or more sections of amino acids (which may be discontinuous) which form a three-dimensional surface with features and/or shapes and/or tertiary structures capable of being recognized by an antigen recognition domain.

[0741] In various embodiments, the CD20 targeting moiety may bind to the full-length and/or mature forms and/or isoforms and/or splice variants and/or fragments and/or any other naturally occurring or synthetic analogs, variants, or mutants of CD20 (e.g., human CD20). In various embodiments, the CD20 targeting moiety may bind to any forms of CD20 (e.g., human CD20), including monomeric, dimeric, trimeric, tetrameric, heterodimeric, multimeric and associated forms. In an embodiment, the CD20 targeting moiety binds to the monomeric form of CD20. In another embodiment, the CD20 targeting moiety binds to a dimeric form of CD20. In another embodiment, the CD20 targeting moiety binds to a tetrameric form of CD20. In a further embodiment, the CD20 targeting moiety to phosphorylated form of CD20, which may be either monomeric, dimeric, or tetrameric.

[0742] In an embodiment, the CD20 targeting moiety comprises a targeting moiety with an antigen recognition domain that recognizes one or more epitopes present on human CD20. In an embodiment, the human CD20 comprises the amino acid sequence of SEQ ID NO: 1346.

[0743] In various embodiments, the CD20 targeting moiety comprises a targeting moiety capable of specific binding. In various embodiments, the CD20 targeting moiety comprises a targeting moiety having an antigen recognition domain such as an antibody or derivatives thereof.

[0744] In some embodiments, the CD20 targeting moiety comprises a targeting moiety which is an antibody derivative or format. In some embodiments, the CD20 targeting moiety comprises a targeting moiety that is a single-domain antibody, a recombinant heavy-chain-only antibody (VHH), a single-chain antibody (scFv), a shark heavy-chain-only antibody (VNAR), a microprotein (cysteine knot protein, knottin), a DARPin; a Tetranectin; an Affibody; an Affimer, a Transbody; an Anticalin; an AdNectin; an Affilin; a Microbody; a peptide aptamer; an alterases; a plastic antibodies; a phylomer; a stradobodies; a maxibodies; an evibody; a fynomer, an armadillo repeat protein, a Kunitz domain, an avimer, an atrimer, a probody, an immunobody, a triomab, a troybody; a pepbody; a vaccibody, a UniBody; a DuoBody, a Fv, a Fab, a Fab′, a F(ab′)₂, a peptide mimetic molecule, or a small (e.g. synthetic or natural) molecule, e.g. without limitation, as described in Patent Publication Nos. or U.S. Pat. No. 7,417,130, US 2004/132094, U.S. Pat. No. 5,831,012, US 2004/023334, U.S. Pat. Nos. 7,250,297, 6,818,418, US 2004/209243, U.S. Pat. Nos. 7,838,629, 7,186,524, 6,004,746, 5,475,096, US 2004/146938, US 2004/157209, U.S. Pat. Nos. 6,994,982, 6,794,144, US 2010/239633, U.S. Pat. No. 7,803,907, US 2010/119446, and/or U.S. Pat. No. 7,166,697, the contents of which are hereby incorporated by reference in their entireties. See also, Storz MAbs. 2011 May-June; 3(3): 310-317.

[0745] In some embodiments, the CD20 targeting moiety comprises a targeting moiety that is a single-domain antibody, such as a VHH. The VHH may be derived from, for example, an organism that produces VHH antibody such as a camelid, a shark, or the VHH may be a designed VHH. VHHs are antibody-derived therapeutic proteins that contain the unique structural and functional properties of naturally-occurring heavy-chain antibodies. VHH technology is based on fully functional antibodies from camelids that lack light chains. These heavy-chain antibodies contain a single variable domain (V_{H}H) and two constant domains (CH2 and CH3). VHHs are commercially available under the trademark of NANOBODIES. In an embodiment, the CD20 targeting moiety comprises a Nanobody. In some embodiments, the single domain antibody as described herein is an immunoglobulin single variable domain or ISVD.

[0746] In some embodiments, the CD20 targeting moiety comprises a targeting moiety which is a VHH comprising a single amino acid chain having four “framework regions” or FRs and three “complementary determining regions” or CDRs. As used herein, “framework region” or “FR” refers to a region in the variable domain which is located between the CDRs. As used herein, “complementary determining region” or “CDR” refers to variable regions in VHHs that contains the amino acid sequences capable of specifically binding to antigenic targets.

[0747] In various embodiments, the CD20 targeting moiety comprises a VHH having a variable domain comprising at least one CDR1, CDR2, and/or CDR3 sequences.

[0748] In some embodiments, the CDR1 sequence is selected from SEQ ID Nos.: 1347-1366. In some embodiments, the CDR2 sequence is selected from SEQ ID Nos.: 1367-1383. In some embodiments, the CDR3 sequence is selected from SEQ ID Nos.: 1384-1396.

[0749] In various embodiments, the CD20 targeting moiety comprises a CDR1 comprising the amino acid sequence of SEQ ID NO: 1347, a CDR2 comprising the amino acid sequence of SEQ ID NO: 1367, and a CDR3 comprising the amino acid sequence of SEQ ID NO: 1384.

[0750] In various embodiments, the CD20 targeting moiety comprises a CDR1 comprising the amino acid sequence of SEQ ID NO: 1347, a CDR2 comprising the amino acid sequence of SEQ ID NO: 1368, and a CDR3 comprising the amino acid sequence of SEQ ID NO: 1384.

[0751] In various embodiments, the CD20 targeting moiety comprises a CDR1 comprising the amino acid sequence of SEQ ID NO: 1348, a CDR2 comprising the amino acid sequence of SEQ ID NO: 1367, and a CDR3 comprising the amino acid sequence of SEQ ID NO: 1384.

[0752] In various embodiments, the CD20 targeting moiety comprises a CDR1 comprising the amino acid sequence of SEQ ID NO: 1349, a CDR2 comprising the amino acid sequence of SEQ ID NO: 1367, and a CDR3 comprising the amino acid sequence of SEQ ID NO: 1384.

[0753] In various embodiments, the CD20 targeting moiety comprises a CDR1 comprising the amino acid sequence of SEQ ID NO: 1350, a CDR2 comprising the amino acid sequence of SEQ ID NO: 1369, and a CDR3 comprising the amino acid sequence of SEQ ID NO: 1385.

[0754] In various embodiments, the CD20 targeting moiety comprises a CDR1 comprising the amino acid sequence of SEQ ID NO: 1351, a CDR2 comprising the amino acid sequence of SEQ ID NO: 1370, and a CDR3 comprising the amino acid sequence of SEQ ID NO: 1386.

[0755] In various embodiments, the CD20 targeting moiety comprises a CDR1 comprising the amino acid sequence of SEQ ID NO: 1352, a CDR2 comprising the amino acid sequence of SEQ ID NO: 1371, and a CDR3 comprising the amino acid sequence of SEQ ID NO: 1387.

[0756] In various embodiments, the CD20 targeting moiety comprises a CDR1 comprising the amino acid sequence of SEQ ID NO: 1353, a CDR2 comprising the amino acid sequence of SEQ ID NO: 1371, and a CDR3 comprising the amino acid sequence of SEQ ID NO: 1388.

[0757] In various embodiments, the CD20 targeting moiety comprises a CDR1 comprising the amino acid sequence of SEQ ID NO: 1354, a CDR2 comprising the amino acid sequence of SEQ ID NO: 1372, and a CDR3 comprising the amino acid sequence of SEQ ID NO: 1389.

[0758] In various embodiments, the CD20 targeting moiety comprises a CDR1 comprising the amino acid sequence of SEQ ID NO: 1355, a CDR2 comprising the amino acid sequence of SEQ ID NO: 1373, and a CDR3 comprising the amino acid sequence of SEQ ID NO: 1390.

[0759] In various embodiments, the CD20 targeting moiety comprises a CDR1 comprising the amino acid sequence of SEQ ID NO: 1355, a CDR2 comprising the amino acid sequence of SEQ ID NO: 1374, and a CDR3 comprising the amino acid sequence of SEQ ID NO: 1390.

[0760] In various embodiments, the CD20 targeting moiety comprises a CDR1 comprising the amino acid sequence of SEQ ID NO: 1355, a CDR2 comprising the amino acid sequence of SEQ ID NO: 1375, and a CDR3 comprising the amino acid sequence of SEQ ID NO: 1390.

[0761] In various embodiments, the CD20 targeting moiety comprises a CDR1 comprising the amino acid sequence of SEQ ID NO: 1356, a CDR2 comprising the amino acid sequence of SEQ ID NO: 1374, and a CDR3 comprising the amino acid sequence of SEQ ID NO: 1390.

[0762] In various embodiments, the CD20 targeting moiety comprises a CDR1 comprising the amino acid sequence of SEQ ID NO: 1357, a CDR2 comprising the amino acid sequence of SEQ ID NO: 1376, and a CDR3 comprising the amino acid sequence of SEQ ID NO: 1391.

[0763] In various embodiments, the CD20 targeting moiety comprises a CDR1 comprising the amino acid sequence of SEQ ID NO: 1358, a CDR2 comprising the amino acid sequence of SEQ ID NO: 1377, and a CDR3 comprising the amino acid sequence of SEQ ID NO: 1392.

[0764] In various embodiments, the CD20 targeting moiety comprises a CDR1 comprising the amino acid sequence of SEQ ID NO: 1359, a CDR2 comprising the amino acid sequence of SEQ ID NO: 1377, and a CDR3 comprising the amino acid sequence of SEQ ID NO: 1392.

[0765] In various embodiments, the CD20 targeting moiety comprises a CDR1 comprising the amino acid sequence of SEQ ID NO: 1360, a CDR2 comprising the amino acid sequence of SEQ ID NO: 1377, and a CDR3 comprising the amino acid sequence of SEQ ID NO: 1392.

[0766] In various embodiments, the CD20 targeting moiety comprises a CDR1 comprising the amino acid sequence of SEQ ID NO: 1361, a CDR2 comprising the amino acid sequence of SEQ ID NO: 1378, and a CDR3 comprising the amino acid sequence of SEQ ID NO: 1392.

[0767] In various embodiments, the CD20 targeting moiety comprises a CDR1 comprising the amino acid sequence of SEQ ID NO: 1362, a CDR2 comprising the amino acid sequence of SEQ ID NO: 1379, and a CDR3 comprising the amino acid sequence of SEQ ID NO: 1392.

[0768] In various embodiments, the CD20 targeting moiety comprises a CDR1 comprising the amino acid sequence of SEQ ID NO: 1363, a CDR2 comprising the amino acid sequence of SEQ ID NO: 1377, and a CDR3 comprising the amino acid sequence of SEQ ID NO: 1392.

[0769] In various embodiments, the CD20 targeting moiety comprises a CDR1 comprising the amino acid sequence of SEQ ID NO: 1364, a CDR2 comprising the amino acid sequence of SEQ ID NO: 1380, and a CDR3 comprising the amino acid sequence of SEQ ID NO: 1393.

[0770] In various embodiments, the CD20 targeting moiety comprises a CDR1 comprising the amino acid sequence of SEQ ID NO: 1365, a CDR2 comprising the amino acid sequence of SEQ ID NO: 1381, and a CDR3 comprising the amino acid sequence of SEQ ID NO: 1394.

[0771] In various embodiments, the CD20 targeting moiety comprises a CDR1 comprising the amino acid sequence of SEQ ID NO: 1366, a CDR2 comprising the amino acid sequence of SEQ ID NO: 1382, and a CDR3 comprising the amino acid sequence of SEQ ID NO: 1395.

[0772] In various embodiments, the CD20 targeting moiety comprises a CDR1 comprising the amino acid sequence of SEQ ID NO: 1366, a CDR2 comprising the amino acid sequence of SEQ ID NO: 1383, and a CDR3 comprising the amino acid sequence of SEQ ID NO: 1396.

[0773] In various embodiments, the CD20 targeting moiety comprises an amino acid sequence selected from the following sequences: 2HCD16 (SEQ ID NO: 1397); 2HCD22 (SEQ ID NO: 1398);

2HCD35 (SEQ ID NO: 1399); 2HCD42 (SEQ ID NO: 1400); 2HCD73 (SEQ ID NO: 1401); 2HCD81 (SEQ ID NO: 1402); R3CD105 (SEQ ID NO: 1403); R3CD18 (SEQ ID NO: 1404); R3CD7 (SEQ ID NO: 1405); 2HCD25 (SEQ ID NO: 1406); 2HCD78 (SEQ ID NO: 1407); 2HCD17 (SEQ ID NO: 1408); 2HCD40 (SEQ ID NO: 1409); 2HCD88 (SEQ ID NO: 1410); 2HCD59 (SEQ ID NO: 1411); 2HCD68 (SEQ ID NO: 1412); 2HCD43 (SEQ ID NO: 1413); 2MC57 (SEQ ID NO: 1414); R2MUC70 (SEQ ID NO: 1415); R3MUC17 (SEQ ID NO: 1416); R3MUC56 (SEQ ID NO: 1417); R3MUC57 (SEQ ID NO: 1418); R3MUC58 (SEQ ID NO: 1419); R2MUC85 (SEQ ID NO: 1420); R3MUC66 (SEQ ID NO: 1421); R2MUC21 (SEQ ID NO: 1422); 2MC52 (SEQ ID NO: 1423); R3MUC22 (SEQ ID NO: 1424); R3MUC75 (SEQ ID NO: 1425); 2MC39 (SEQ ID NO: 1426); 2MC51 (SEQ ID NO: 1427); 2MC38 (SEQ ID NO: 1428); 2MC82 (SEQ ID NO: 1429); 2MC20 (SEQ ID NO: 1430); 2MC42 (SEQ ID NO:1431); R2MUC36 (SEQ ID NO: 1432); R3MCD137 (SEQ ID NO: 1433); or R3MCD22 (SEQ ID NO: 1434).

[0774] In some embodiments, the CD20 targeting moiety comprises an amino acid sequence selected from SEQ ID NOs: 1397-1434 (provided above) without the terminal histidine tag sequence (i.e., HHHHHH; SEQ ID NO: 393).

[0775] In some embodiments, the CD20 targeting moiety comprises an amino acid sequence selected from SEQ ID NOs: 1397-1434 (provided above) without the HA tag (i.e., YPYDVPDYGS; SEQ ID NO: 394).

[0776] In some embodiments, the CD20 targeting moiety comprises an amino acid sequence selected from SEQ ID NOs: 1397-1434 (provided above) without the AAA linker (i.e., AAA).

[0777] In some embodiments, the CD20 targeting moiety comprises an amino acid sequence selected from SEQ ID NOs: 1397-1434 (provided above) without the AAA linker and HA tag.

[0778] In some embodiments, the CD20 targeting moiety comprises an amino acid sequence selected from SEQ ID NOs: 1397-1434 (provided above) without the AAA linker, HA tag, and terminal histidine tag sequence (i.e., AAAYPYDVPDYGSHHHHHH; SEQ ID NO: 395).

[0779] In various embodiments, the present technology contemplates the use of any natural or synthetic analogs, mutants, variants, alleles, homologs and orthologs (herein collectively referred to as “analogs”) of the CD20 targeting moiety as described herein. In various embodiments, the amino acid sequence of the CD20 targeting moiety further includes an amino acid analog, an amino acid derivative, or other non-classical amino acids.

[0780] In various embodiments, the CD20 targeting moiety comprises a targeting moiety comprising a sequence that is at least 60% identical to any one of the CD20 sequences disclosed above. In various embodiments, the CD20 targeting moiety comprises a sequence that is at least 60% identical to any one of the CD20 sequences disclosed above minus the linker sequence, the HA tag and/or the HIS₆ tag. For example, the CD20 targeting moiety may comprise a sequence that is at least about 60%, at least about 61%, at least about 62%, at least about 63%, at least about 64%, at least about 65%, at least about 66%, at least about 67%, at least about 68%, at least about 69%, at least about 70%, at least about 71%, at least about 72%, at least about 73%, at least about 74%, at least about 75%, at least about 76%, at least about 77%, at least about 78%, at least about 79%, at least about 80%, at least about 81%, at least about 82%, at least about 83%, at least about 84%, at least about 85%, at least about 86%, at least about 87%, at least about 88%, at least about 89%, at least about 90%, at least about 91%, at least about 92%, at least about 93%, at least about 94%, at least about 95%, at least about 96%, at least about 97%, at least about 98%, at least about 99%, or 100% identical to any one of the CD20 sequences disclosed herein (e.g. about 60%, or about 61%, or about 62%, or about 63%, or about 64%, or about 65%, or about 66%, or about 67%, or about 68%, or about 69%, or about 70%, or about 71%, or about 72%, or about 73%, or about 74%, or about 75%, or about 76%, or about 77%, or about 78%, or about 79%, or about 80%, or about 81%, or about 82%, or about 83%, or about 84%, or about 85%, or about 86%, or about 87%, or about 88%, or about 89%, or about 90%, or about 91%, or about 92%, or about 93%, or about 94%, or about 95%, or about 96%, or about 97%, or about 98%, about 99% or about 100% sequence identity to any one of the CD20 sequences disclosed herein).

[0781] In various embodiments, the CD20 targeting moiety comprises an amino acid sequence having one or more amino acid mutations. In various embodiments, the CD20 targeting moiety comprises an amino acid sequence having one, or two, or three, or four, or five, or six, or seen, or eight, or nine, or ten, or fifteen, or twenty amino acid mutations with respect to any one of the CD20 sequences disclosed above. In some embodiments, the one or more amino acid mutations may be independently selected from substitutions, insertions, deletions, and truncations.

[0782] In some embodiments, the amino acid mutations are amino acid substitutions, and may include conservative and/or non-conservative substitutions.

[0783] “Conservative substitutions” may be made, for instance, on the basis of similarity in polarity, charge, size, solubility, hydrophobicity, hydrophilicity, and/or the amphipathic nature of the amino acid residues involved. The 20 naturally occurring amino acids can be grouped into the following six standard amino acid groups: (1) hydrophobic: Met, Ala, Val, Leu, Ile; (2) neutral hydrophilic: Cys, Ser, Thr; Asn, Gln; (3) acidic: Asp, Glu; (4) basic: His, Lys, Arg; (5) residues that influence chain orientation: Gly, Pro; and (6) aromatic: Trp, Tyr, Phe.

[0784] As used herein, “conservative substitutions” are defined as exchanges of an amino acid by another amino acid listed within the same group of the six standard amino acid groups shown above. For example, the exchange of Asp by Glu retains one negative charge in the so modified polypeptide. In addition, glycine and proline may be substituted for one another based on their ability to disrupt α-helices.

[0785] As used herein, “non-conservative substitutions” are defined as exchanges of an amino acid by another amino acid listed in a different group of the six standard amino acid groups (1) to (6) shown above.

[0786] In various embodiments, the substitutions may also include non-classical amino acids (e.g. selenocysteine, pyrrolysine, N-formylmethionine β-alanine, GABA and δ-Aminolevulinic acid, 4-aminobenzoic acid (PABA), D-isomers of the common amino acids, 2,4-diaminobutyric acid, α-amino isobutyric acid, 4-aminobutyric acid, Abu, 2-amino butyric acid, γ-Abu, ε-Ahx, 6-amino hexanoic acid, Aib, 2-amino isobutyric acid, 3-amino propionic acid, ornithine, norleucine, norvaline, hydroxyproline, sarcosme, citrulline, homocitrulline, cysteic acid, t-butylglycine, t-butylalanine, phenylglycine, cyclohexylalanine, β-alanine, fluoro-amino acids, designer amino acids such as β methyl amino acids, C α-methyl amino acids, N α-methyl amino acids, and amino acid analogs in general).

[0787] In various embodiments, the amino acid mutation may be in the CDRs of the targeting moiety (e.g., the CDR1, CDR2 or CDR3 regions). In another embodiment, amino acid alteration may be in the framework regions (FRs) of the targeting moiety (e.g., the FR1, FR2, FR3, or FR4 regions).

[0788] Modification of the amino acid sequences may be achieved using any known technique in the art e.g., site-directed mutagenesis or PCR based mutagenesis. Such techniques are described, for example, in Sambrook et al., Molecular Cloning: A Laboratory Manual, Cold Spring Harbor Press, Plainview, N.Y., 1989 and Ausubel et al., Current Protocols in Molecular Biology, John Wiley & Sons, New York, N.Y., 1989.

[0789] In various embodiments, the mutations do not substantially reduce the CD20 targeting moiety's capability to specifically bind to CD20. In various embodiments, the mutations do not substantially reduce the CD20 targeting moiety's capability to specifically bind to CD20 without neutralizing CD20.

[0790] In various embodiments, the binding affinity of the CD20 targeting moiety for the full-length and/or mature forms and/or isoforms and/or splice variants and/or fragments and/or monomeric and/or dimeric and/or tetrameric forms and/or any other naturally occurring or synthetic analogs, variants, or mutants (including monomeric and/or dimeric and/or tetrameric forms) of human CD20 may be described by the equilibrium dissociation constant (K_{D}). In various embodiments, the CD20 targeting moiety comprises a targeting moiety that binds to the full-length and/or mature forms and/or isoforms and/or splice variants and/or fragments and/or any other naturally occurring or synthetic analogs, variants, or mutants (including monomeric and/or dimeric and/or tetrameric forms) of human CD20 with a K_{D} of less than about 1 μM, about 900 nM, about 800 nM, about 700 nM, about 600 nM, about 500 nM, about 400 nM, about 300 nM, about 200 nM, about 100 nM, about 90 nM, about 80 nM, about 70 nM, about 60 nM, about 50 nM, about 40 nM, about 30 nM, about 20 nM, about 10 nM, or about 5 nM, or about 4.5 nM, or about 1 nM.

[0791] In various embodiments, the CD20 targeting moiety comprises a targeting moiety that binds but does not functionally modulate the antigen of interest, i.e., CD20. For instance, in various embodiments, the targeting moiety of the CD20 targeting moiety simply targets the antigen but does not substantially functionally modulate (e.g. substantially inhibit, reduce or neutralize) a biological effect that the antigen has. In various embodiments, the CD20 targeting moiety binds an epitope that is physically separate from an antigen site that is important for its biological activity (e.g. an antigen's active site).

[0792] Such binding without significant function modulation finds use in various embodiments of the present application. In various embodiments, the CD20 targeting moiety binds to CD20 positive cells and induces the death of such cells. In some embodiments, the CD20 targeting moiety induces cell death as mediated by one or more of apoptosis or direct cell death, complement-dependent cytotoxicity (CDC), antibody-dependent cellular cytotoxicity (ADCC), and/or or antibody-dependent cellular phagocytosis (ADCP). In some embodiments, the present CD20 targeting moiety induces translocation of CD20 into large lipid microdomains or ‘lipid rafts’ within the plasma membrane upon binding. This clustering process enhances the activation of complement and exerts strong complement-dependent cytotoxicity (CDC). In other embodiments, the CD20 targeting moiety induces direct cell death. In alternative embodiments, the therapeutic efficacy of the CD20 targeting moiety is not dependent on B cell depletion.

[0793] In various embodiments, the CD20 targeting moiety may be used to directly or indirectly recruit active immune cells to a site of need via an effector antigen. For example, in various embodiments, the CD20 targeting moiety may be used to directly or indirectly recruit an immune cell to a cancer or tumor cell in a method of reducing or eliminating a cancer or tumor (e.g. the CD20 targeting moiety may comprise an anti-CD20 antigen recognition domain and a targeting moiety having a recognition domain (e.g. antigen recognition domain) directed against Clec9A, which is an antigen expressed on dendritic cells). In these embodiments, CD20 signaling is an important piece of the cancer reducing or eliminating effect. In various embodiments, the CD20 targeting moiety may recruit a T cell, a B cell, a dendritic cell, a macrophage, and a natural killer (NK) cell.

### Bispecific and Multispecific Targeting Moiety Formats

[0794] In some embodiments, the Fc-based chimeric protein complexes of the present technology comprise one or more targeting moieties disclosed herein. In various embodiments, the Fc-based chimeric protein complexes have targeting moieties that target two different cells (e.g. to make a synapse) or the same cell (e.g. to get a more concentrated signaling agent effect). In various embodiments, the Fc-based chimeric protein complexes have two or more copies of the same targeting moiety (multivalency), e.g. to increase the affinity of target binding.

[0795] In various embodiments, the Fc-based chimeric protein complexes of the present technology are multi-specific, i.e., the Fc-based chimeric protein complex comprises two or more targeting moieties having recognition domains (e.g. antigen recognition domains) that recognize and bind two or more targets (e.g. antigens, or receptors, or epitopes). In such embodiments, the Fc-based chimeric protein complexes may comprise two more targeting moieties having recognition domains that recognize and bind two or more epitopes on the same antigen or on different antigens or on different receptors. In various embodiments, such multi-specific Fc-based chimeric protein complexes exhibit advantageous properties such as increased avidity and/or improved selectivity. In some embodiments, the Fc-based chimeric protein complex comprises two targeting moieties and is bispecific, i.e., binds and recognizes two epitopes on the same antigen or on different antigens or different receptors. Accordingly, in various embodiments, the Fc-based chimeric protein complex encompasses such multi-specific Fc-based chimeric protein complexes comprising two or more targeting moieties.

[0796] In various embodiments, the multi-specific Fc-based chimeric protein complexes comprises two or more targeting moieties with each targeting moiety being an antibody or an antibody derivative as described herein. In an embodiment, the multi-specific Fc-based chimeric protein complex comprises at least one VHH comprising an antigen recognition domain against one target and one antibody or antibody derivative comprising a recognition domain against a tumor antigen and/or an immune cell marker.

[0797] In various embodiments, the present multi-specific Fc-based chimeric protein complexes have two or more targeting moieties that target different antigens or receptors, and one targeting moiety may be attenuated for its antigen or receptor, e.g. the targeting moiety binds its antigen or receptor with a low affinity or avidity (including, for example, at an affinity or avidity that is less than the affinity or avidity the other targeting moiety has for its for its antigen or receptor, for instance the difference between the binding affinities may be about 10-fold, or 25-fold, or 50-fold, or 100-fold, or 300-fold, or 500-fold, or 1000-fold, or 5000-fold; for instance the lower affinity or avidity targeting moiety may bind its antigen or receptor at a K_{D} in the mid- to high-nM or low- to mid-μM range while the higher affinity or avidity targeting moiety may bind its antigen or receptor at a K_{D} in the mid- to high-μM or low- to mid-nM range). For instance, in some embodiments, the present multi-specific Fc-based chimeric protein complex comprises an attenuated targeting moiety that is directed against a promiscuous antigen or receptor, which may improve targeting to a cell of interest (e.g. via the other targeting moiety) and prevent effects across multiple types of cells, including those not being targeted for therapy (e.g. by binding promiscuous antigen or receptor at a higher affinity than what is provided in these embodiments).

[0798] The multi-specific Fc-based chimeric protein complexes may be constructed using methods known in the art, see for example, U.S. Pat. No. 9,067,991, U.S. Patent Publication No. 20110262348 and WO 2004/041862, the entire contents of which are hereby incorporated by reference. In an illustrative embodiment, the multi-specific Fc-based chimeric protein complex comprising two or more targeting moieties may be constructed by chemical crosslinking, for example, by reacting amino acid residues with an organic derivatizing agent as described by Blattler et al., Biochemistry 24, 1517-1524 and EP294703, the entire contents of which are hereby incorporated by reference. In another illustrative embodiment, the multi-specific Fc-based chimeric protein complex comprising two or more targeting moieties is constructed by genetic fusion, i.e., constructing a single polypeptide which includes the polypeptides of the individual targeting moieties. For example, a single polypeptide construct may be formed which encodes a first VHH with an antigen recognition domain against a first target and a second antibody or antibody derivative with an antigen recognition domain against e.g., a tumor antigen or a checkpoint inhibitor. A method for producing bivalent or multivalent VHH polypeptide constructs is disclosed in PCT patent application WO 96/34103, the entire contents of which is hereby incorporated by reference. In a further illustrative embodiment, the multi-specific Fc-based chimeric protein complex may be constructed by using linkers. For example, the carboxy-terminus of a first VHH with an antigen recognition domain against a first target may be linked to the amino-terminus of a second antibody or antibody derivative with an antigen recognition domain against e.g., a tumor antigen or a checkpoint inhibitor (or vice versa). Illustrative linkers that may be used are described herein. In some embodiments, the components of the multi-specific Fc-based chimeric protein complex are directly linked to each other without the use of linkers.

[0799] In various embodiments, the multi-specific Fc-based chimeric protein complex recognizes and binds to a target (e.g., XCR1, Clec9A, FAP, PD-1, PD-L1, PD-L2, SIRP1α, or CD8) and one or more antigens found on one or more immune cells, which can include, without limitation, megakaryocytes, thrombocytes, erythrocytes, mast cells, basophils, neutrophils, eosinophils, monocytes, macrophages, natural killer cells, T lymphocytes (e.g., cytotoxic T lymphocytes, T helper cells, natural killer T cells), B lymphocytes, plasma cells, dendritic cells, or subsets thereof. In some embodiments, the Fc-based chimeric protein complex specifically binds to an antigen of interest and effectively directly or indirectly recruits one of more immune cells.

[0800] In various embodiments, the multi-specific Fc-based chimeric protein complex recognizes and binds to target (e.g., XCR1, Clec9A, FAP, PD-1, PD-L1, PD-L2, SIRP1α, or CD8) and one or more antigens found on tumor cells. In these embodiments, the present Fc-based chimeric protein complex may directly or indirectly recruit an immune cell to a tumor cell or the tumor microenvironment. In some embodiments, the present Fc-based chimeric protein complex may directly or indirectly recruit an immune cell, e.g. an immune cell that can kill and/or suppress a tumor cell (e.g., a CTL), to a site of action (such as, by way of non-limiting example, the tumor microenvironment). In some embodiments, the present Fc-based chimeric protein complex enhances antigen presentation (e.g. tumor antigen presentation) by dendritic cells for the induction of a potent humoral and cytotoxic T cell response.

[0801] In some embodiments, the Fc-based chimeric protein complex may have two or more targeting moieties that bind to non-cellular structures. In some embodiments, there are two targeting moieties and one targets a cell while the other targets a non-cellular structure.

[0802] In some embodiments, the present Fc-based chimeric protein complex has (i) one or more of the targeting moieties which is directed against an immune cell selected from a T cell, a B cell, a dendritic cell, a macrophage, a NK cell, or subsets thereof and (ii) one or more of the targeting moieties which is directed against a tumor cell, along with any of the signaling agents described herein. In one embodiment, the Fc-based chimeric protein complex has (i) a targeting moiety directed against a T cell (including, without limitation an effector T cell) and (ii) a targeting moiety is directed against a tumor cell, along with any of the signaling agents described herein. In one embodiment, the present Fc-based chimeric protein complex has (i) a targeting moiety directed against a B cell and (ii) a targeting moiety is directed against a tumor cell, along with any of the signaling agents described herein. In one embodiment, the present Fc-based chimeric protein complex has (i) a targeting moiety directed against a dendritic cell and (ii) a targeting moiety is directed against a tumor cell, along with any of the signaling agents described herein. In one embodiment, the present Fc-based chimeric protein complex has (i) a targeting moiety directed against a macrophage and (ii) a targeting moiety is directed against a tumor cell, along with any of the signaling agents described herein. In one embodiment, the present Fc-based chimeric protein complex has (i) a targeting moiety directed against a NK cell and (ii) a targeting moiety is directed against a tumor cell, along with any of the signaling agents described herein.

[0803] By way of non-limiting example, in various embodiments, the present Fc-based chimeric protein complex has (i) a targeting moiety directed against a T cell, for example, mediated by targeting to CD8, SLAMF4, IL-2 R α, 4-1BB/TNFRSF9, IL-2 R β, ALCAM, B7-1, IL-4 R, B7-H3, BLAME/SLAMFS, CEACAM1, IL-6 R, CCR3, IL-7 Rα, CCR4, CXCRI/IL-S RA, CCR5, CCR6, IL-10R α, CCR 7, IL-I 0 R β, CCRS, IL-12 R β1, CCR9, IL-12 R β2, CD2, IL-13 R α 1, IL-13, CD3, CD4, ILT2/CDS5j, ILT3/CDS5k, ILT4/CDS5d, ILT5/CDS5a, lutegrin α 4/CD49d, CDS, Integrin α E/CD103, CD6, Integrin α M/CD 11 b, CDS, Integrin α X/CD11c, Integrin β 2/CDIS, KIR/CD15S, CD27/TNFRSF7, KIR2DL1, CD2S, KIR2DL3, CD30/TNFRSFS, KIR2DL4/CD15Sd, CD31/PECAM-1, KIR2DS4, CD40 Ligand/TNFSF5, LAG-3, CD43, LAIR1, CD45, LAIR2, CDS3, Leukotriene B4-R1, CDS4/SLAMF5, NCAM-L1, CD94, NKG2A, CD97, NKG2C, CD229/SLAMF3, NKG2D, CD2F-10/SLAMF9, NT-4, CD69, NTB-A/SLAMF6, Common γ Chain/IL-2 R γ, Osteopontin, CRACC/SLAMF7, PD-1, CRTAM, PSGL-1, CTLA-4, RANK/TNFRSF11A, CX3CR1, CX3CL1, L-Selectin, CXCR3, SIRP β 1, CXCR4, SLAM, CXCR6, TCCR/WSX-1, DNAM-1, Thymopoietin, EMMPRIN/CD147, TIM-1, EphB6, TIM-2, Fas/TNFRSF6, TIM-3, Fas Ligand/TNFSF6, TIM-4, Fcγ RIII/CD16, TIM-6, TNFR1/TNFRSF1A, Granulysin, TNF RIII/TNFRSF1B, TRAIL RI/TNFRSFIOA, ICAM-1/CD54, TRAIL R2/TNFRSF10B, ICAM-2/CD102, TRAILR3/TNFRSF10C, IFN-γR1, TRAILR4/TNFRSF10D, IFN-γ R2, TSLP, IL-1 R1, or TSLP R; and (ii) a targeting moiety is directed against a tumor cell, along with any of the signaling agents described herein.

[0804] By way of non-limiting example, in various embodiments, the present Fc-based chimeric protein complex has a targeting moiety directed against (i) a checkpoint marker expressed on a T cell, e.g. one or more of PD-1, CD28, CTLA4, ICOS, BTLA, KIR, LAG3, CD137, OX40, CD27, CD40L, TIM3, and A2aR and (ii) a targeting moiety is directed against a tumor cell, along with any of the signaling agents described herein.

[0805] In one embodiment, the present Fc-based chimeric protein complex has (i) a targeting moiety directed against a T cell, for example, mediated by targeting to CD8 and (ii) a targeting moiety is directed against a tumor cell, along with any of the signaling agents described herein. In an embodiment, the present Fc-based chimeric protein complex has a targeting moiety directed against CD8 on T cells and a second targeting moiety directed against PD-L1 or PD-L2 on tumor cells.

[0806] In one embodiment, the present Fc-based chimeric protein complex has (i) a targeting moiety directed against a T cell, for example, mediated by targeting to CD4 and (ii) a targeting moiety is directed against a tumor cell, along with any of the signaling agents described herein. In an embodiment, the present Fc-based chimeric protein complex has a targeting moiety directed against CD4 on T cells and a second targeting moiety directed against PD-L1 or PD-L2 on tumor cells.

[0807] In one embodiment, the present Fc-based chimeric protein complex has (i) a targeting moiety directed against a T cell, for example, mediated by targeting to CD3, CXCR3, CCR4, CCR9, CD70, CD103, or one or more immune checkpoint markers and (ii) a targeting moiety is directed against a tumor cell, along with any of the signaling agents described herein. In an embodiment, the present Fc-based chimeric protein complex has a targeting moiety directed against CD3 on T cells and a second targeting moiety directed against PD-L1 or PD-L2 on tumor cells.

[0808] In one embodiment, the present Fc-based chimeric protein complex has (i) a targeting moiety directed against a T cell, for example, mediated by targeting to PD-1 and (ii) a targeting moiety is directed against a tumor cell, along with any of the signaling agents described herein.

[0809] By way of non-limiting example, in various embodiments, the present Fc-based chimeric protein complex has (i) a targeting moiety directed against a B cell, for example, mediated by targeting to CD10, CD19, CD20, CD21, CD22, CD23, CD24, CD37, CD38, CD39, CD40, CD70, CD72, CD73, CD74, CDw75, CDw76, CD77, CD78, CD79a/b, CD80, CD81, CD82, CD83, CD84, CD85, CD86, CD89, CD98, CD126, CD127, CDw130, CD138, or CDw150; and (ii) a targeting moiety is directed against a tumor cell, along with any of the signaling agents described herein. In an embodiment, the present Fc-based chimeric protein complex has a targeting moiety directed against CD20.

[0810] In one embodiment, the present Fc-based chimeric protein complex has (i) a targeting moiety directed against a B cell, for example, mediated by targeting to CD19, CD20 or CD70 and (ii) a targeting moiety is directed against a tumor cell, along with any of the signaling agents described herein.

[0811] In one embodiment, the present Fc-based chimeric protein complex has (i) a targeting moiety directed against a B cell, for example, mediated by targeting to CD20 and (ii) a targeting moiety is directed against a tumor cell, along with any of the signaling agents described herein. In an embodiment, the present has a targeting moiety directed against CD20 on B cells and a second targeting moiety directed against PD-L1 or PD-L2 on tumor cells.

[0812] By way of non-limiting example, in various embodiments, the present Fc-based chimeric protein complex has (i) a targeting moiety directed against a NK cell, for example, mediated by targeting to 2B4/SLAMF4, KIR2DS4, CD155/PVR, KIR3DL1, CD94, LMIR1/CD300A, CD69, LMIR2/CD300c, CRACC/SLAMF7, LMIR3/CD300LF, DNAM-1, LMIR5/CD300LB, Fc-epsilon RII, LMIR6/CD300LE, Fc-γ RI/CD64, MICA, Fc-γ RIIB/CD32b, MICB, Fc-γ RIIC/CD32c, MULT-1, Fc-γ RIIA/CD32a, Nectin-2/CD112, Fc-γ RIII/CD16, NKG2A, FcRH1/IRTA5, NKG2C, FcRH2/IRTA4, NKG2D, FcRH4/IRTA1, NKp30, FcRH5/IRTA2, NKp44, Fc-Receptor-like 3/CD16-2, NKp46/NCR1, NKp80/KLRF1, NTB-A/SLAMF6, Rae-1, Rae-1 α, Rae-1 ρ, Rae-1 delta, H60, Rae-1 epsilon, ILT2/CD85j, Rae-1 γ, ILT3/CD85k, TREM-1, ILT4/CD85d, TREM-2, ILT5/CD85a, TREM-3, KIR/CD158, TREML1/TLT-1, KIR2DL1, ULBP-1, KIR2DL3, ULBP-2, KIR2DL4/CD158d, or ULBP-3; and (ii) a targeting moiety is directed against a tumor cell, along with any of the signaling agents described herein.

[0813] In one embodiment, the present Fc-based chimeric protein complex has (i) a targeting moiety directed against a NK cell, for example, mediated by targeting to Kir1alpha, DNAM-1 or CD64 and (ii) a targeting moiety is directed against a tumor cell, along with any of the signaling agents described herein.

[0814] In one embodiment, the present Fc-based chimeric protein complex has (i) a targeting moiety directed against a NK cell, for example, mediated by targeting to KIR1 and (ii) a targeting moiety is directed against a tumor cell, along with any of the signaling agents described herein. In an embodiment, the present Fc-based chimeric protein complex has a targeting moiety directed against KIR1 on NK cells and a second targeting moiety directed against PD-L1 or PD-L2 on tumor cells.

[0815] In one embodiment, the present Fc-based chimeric protein complex has (i) a targeting moiety directed against a NK cell, for example, mediated by targeting to TIGIT or KIR1 and (ii) a targeting moiety is directed against a tumor cell, along with any of the signaling agents described herein. In an embodiment, the present Fc-based chimeric protein complex has a targeting moiety directed against TIGIT on NK cells and a second targeting moiety directed against PD-L1 or PD-L2 on tumor cells.

[0816] By way of non-limiting example, in various embodiments, the present Fc-based chimeric protein complex has (i) a targeting moiety directed against a dendritic cell, for example, mediated by targeting to CLEC-9A, XCR1, RANK, CD36/SRB3, LOX-1/SR-E1, CD68, MARCO, CD163, SR-A1/MSR, CD5L, SREC-1, CL-PI/COLEC12, SREC-II, LIMPIIISRB2, RP105, TLR4, TLR1, TLR5, TLR2, TLR6, TLR3, TLR9, 4-IBB Ligand/TNFSF9, IL-12/IL-23 p40, 4-Amino-1,8-naphthalimide, ILT2/CD85j, CCL21/6Ckine, ILT3/CD85k, 8-oxo-dG, ILT4/CD85d, 8D6A, ILT5/CD85a, A2B5, lutegrin α 4/CD49d, Aag, Integrin β 2/CD18, AMICA, Langerin, B7-2/CD86, Leukotriene B4 RI, B7-H3, LMIR1/CD300A, BLAME/SLAMF8, LMIR2/CD300c, Clq R1/CD93, LMIR3/CD300LF, CCR6, LMIR5/CD300LB CCR7, LMIR6/CD300LE, CD40/TNFRSF5, MAG/Siglec-4-a, CD43, MCAM, CD45, MD-1, CD68, MD-2, CD83, MDL-1/CLEC5A, CD84/SLAMF5, MMR, CD97, NCAMLI, CD2F-10/SLAMF9, Osteoactivin GPNMB, Chern 23, PD-L2, CLEC-1, RP105, CLEC-2, Siglec-2/CD22, CRACC/SLAMF7, Siglec-3/CD33, DC-SIGN, Siglec-5, DC-SIGNR/CD299, Siglec-6, DCAR, Siglec-7, DCIR/CLEC4A, Siglec-9, DEC-205, Siglec-10, Dectin-1/CLEC7A, Siglec-F, Dectin-2/CLEC6A, SIGNR1/CD209, DEP-1/CD148, SIGNR4, DLEC, SLAM, EMMPRIN/CD147, TCCR/WSX-1, Fc-γ R1/CD64, TLR3, Fc-γ RIIB/CD32b, TREM-1, Fc-γ RIIC/CD32c, TREM-2, Fc-γ RIIA/CD32a, TREM-3, Fc-γ RIII/CD16, TREML1/TLT-1, ICAM-2/CD102, or Vanilloid R1; and (ii) a targeting moiety is directed against a tumor cell, along with any of the signaling agents described herein.

[0817] In one embodiment, the present Fc-based chimeric protein complex has (i) a targeting moiety directed against a dendritic cell, for example, mediated by targeting to CLEC-9A, DC-SIGN, CD64, CLEC4A, or DEC205 and (ii) a targeting moiety is directed against a tumor cell, along with any of the signaling agents described herein. In an embodiment, the present Fc-based chimeric protein complex has a targeting moiety directed against CLEC9A on dendritic cells and a second targeting moiety directed against PD-L1 or PD-L2 on tumor cells.

[0818] In one embodiment, the present Fc-based chimeric protein complex has (i) a targeting moiety directed against a dendritic cell, for example, mediated by targeting to CLEC9A and (ii) a targeting moiety is directed against a tumor cell, along with any of the signaling agents described herein. In an embodiment, the present Fc-based chimeric protein complex has a targeting moiety directed against CLEC9A on dendritic cells and a second targeting moiety directed against PD-L1 or PD-L2 on tumor cells.

[0819] In one embodiment, the present Fc-based chimeric protein complex has (i) a targeting moiety directed against a dendritic cell, for example, mediated by targeting to XCR1 and (ii) a targeting moiety is directed against a tumor cell, along with any of the signaling agents described herein. In an embodiment, the present Fc-based chimeric protein complex has a targeting moiety directed against XCR1 on dendritic cells and a second targeting moiety directed against PD-L1 or PD-L2 on tumor cells.

[0820] In one embodiment, the present Fc-based chimeric protein complex has (i) a targeting moiety directed against a dendritic cell, for example, mediated by targeting to RANK and (ii) a targeting moiety is directed against a tumor cell, along with any of the signaling agents described herein. In an embodiment, the present Fc-based chimeric protein complex has a targeting moiety directed against RANK on dendritic cells and a second targeting moiety directed against PD-L1 or PD-L2 on tumor cells.

[0821] By way of non-limiting example, in various embodiments, the present Fc-based chimeric protein complex has (i) a targeting moiety directed against a monocyte/macrophage, for example, mediated by targeting to SIRP1α, B7-1/CD80, ILT4/CD85d, B7-H1, ILT5/CD85a, Common β Chain, Integrin α 4/CD49d, BLAME/SLAMF8, Integrin α X/CDIIc, CCL6/C10, Integrin β 2/CD18, CD155/PVR, Integrin β 3/CD61, CD31/PECAM-1, Latexin, CD36/SR-B3, Leukotriene B4 R1, CD40/TNFRSF5, LIMPIIISR-B2, CD43, LMIR1/CD300A, CD45, LMIR2/CD300c, CD68, LMIR3/CD300LF, CD84/SLAMF5, LMIR5/CD300LB, CD97, LMIR6/CD300LE, CD163, LRP-1, CD2F-10/SLAMF9, MARCO, CRACC/SLAMF7, MD-1, ECF-L, MD-2, EMMPRIN/CD147, MGL2, Endoglin/CD105, Osteoactivin/GPNMB, Fc-γ RI/CD64, Osteopontin, Fc-γ RIIB/CD32b, PD-L2, Fc-γ RIIC/CD32c, Siglec-3/CD33, Fc-γ RIIA/CD32a, SIGNR1/CD209, Fc-γ RIII/CD16, SLAM, GM-CSF R α, TCCR/WSX-1, ICAM-2/CD102, TLR3, IFN-γ RI, TLR4, IFN-γ R2, TREM-I, IL-I RII, TREM-2, ILT2/CD85j, TREM-3, ILT3/CD85k, TREML1/TLT-1, 2B4/SLAMF 4, IL-10 R α, ALCAM, IL-10 R β, AminopeptidaseN/ANPEP, ILT2/CD85j, Common β Chain, ILT3/CD85k, Clq R1/CD93, ILT4/CD85d, CCR1, ILT5/CD85a, CCR2, CD206, Integrin α 4/CD49d, CCR5, Integrin α M/CDII b, CCR8, Integrin α X/CDIIc, CD155/PVR, Integrin β 2/CD18, CD14, Integrin β 3/CD61, CD36/SR-B3, LAIR1, CD43, LAIR2, CD45, Leukotriene B4-R1, CD68, LIMPIIISR-B2, CD84/SLAMF5, LMIR1/CD300A, CD97, LMIR2/CD300c, CD163, LMIR3/CD300LF, Coagulation Factor III/Tissue Factor, LMIR5/CD300LB, CX3CR1, CX3CL1, LMIR6/CD300LE, CXCR4, LRP-1, CXCR6, M-CSF R, DEP-1/CD148, MD-1, DNAM-1, MD-2, EMMPRIN/CD147, MMR, Endoglin/CD105, NCAM-L1, Fc-γ RI/CD64, PSGL-1, Fc-γ RIIIICD16, RP105, G-CSF R, L-Selectin, GM-CSF R α, Siglec-3/CD33, HVEM/TNFRSF14, SLAM, ICAM-1/CD54, TCCR/WSX-1, ICAM-2/CD102, TREM-1, IL-6 R, TREM-2, CXCRI/IL-8 RA, TREM-3, or TREMLI/TLT-1; and (ii) a targeting moiety is directed against a tumor cell, along with any of the signaling agents described herein.

[0822] In one embodiment, the present Fc-based chimeric protein complex has (i) a targeting moiety directed against a monocyte/macrophage, for example, mediated by targeting to B7-H1, CD31/PECAM-1, CD163, CCR2, or Macrophage Mannose Receptor CD206 and (ii) a targeting moiety is directed against a tumor cell, along with any of the signaling agents described herein.

[0823] In one embodiment, the present Fc-based chimeric protein complex has (i) a targeting moiety directed against a monocyte/macrophage, for example, mediated by targeting to SIRP1α and (ii) a targeting moiety is directed against a tumor cell, along with any of the signaling agents described herein. In an embodiment, the present Fc-based chimeric protein complex has a targeting moiety directed against SIRP1α on macrophage cells and a second targeting moiety directed against PD-L1 or PD-L2 on tumor cells.

[0824] In various embodiments, the present Fc-based chimeric protein complex has one or more targeting moieties directed against a checkpoint marker, e.g. one or more of PD-1/PD-L1 or PD-L2, CD28/CD80 or CD86, CTLA4/CD80 or CD86, ICOS/ICOSL or B7RP1, BTLA/HVEM, KIR, LAG3, CD137/CD137L, OX40/OX40L, CD27, CD40L, TIM3/Gal9, and A2aR. In one embodiment, the present Fc-based chimeric protein complex has (i) a targeting moiety directed against a checkpoint marker on a T cell, for example, PD-1 and (ii) a targeting moiety directed against a tumor cell, for example, PD-L1 or PD-L2, along with any of the signaling agents described herein. In an embodiment, the present Fc-based chimeric protein complex has a targeting moiety directed against PD-1 on T cells and a second targeting moiety directed against PD-L1 on tumor cells. In another embodiment, the present Fc-based chimeric protein complex has a targeting moiety directed against PD-1 on T cells and a second targeting moiety directed against PD-L2 on tumor cells.

[0825] In some embodiments, the present Fc-based chimeric protein complex comprises two or more targeting moieties directed to the same or different immune cells. In some embodiments, the present Fc-based chimeric protein complex has (i) one or more targeting moieties directed against an immune cell selected from a T cell, a B cell, a dendritic cell, a macrophage, a NK cell, or subsets thereof and (ii) one or more targeting moieties directed against either the same or another immune cell selected from a T cell, a B cell, a dendritic cell, a macrophage, a NK cell, or subsets thereof, along with any of the signaling agents described herein.

[0826] In one embodiment, the present Fc-based chimeric protein complex comprises one or more targeting moieties directed against a T cell and one or more targeting moieties directed against the same or another T cell. In one embodiment, the present Fc-based chimeric protein complex comprises one or more targeting moieties directed against a T cell and one or more targeting moieties directed against a B cell. In one embodiment, the present Fc-based chimeric protein complex comprises one or more targeting moieties directed against a T cell and one or more targeting moieties directed against a dendritic cell. In one embodiment, the present Fc-based chimeric protein complex comprises one or more targeting moieties against a T cell and one or more targeting moieties directed against a macrophage. In one embodiment, the present Fc-based chimeric protein complex comprises one or more targeting moieties against a T cell and one or more targeting moieties directed against a NK cell. For example, in an illustrative embodiment, the Fc-based chimeric protein complex may include a targeting moiety against CD8 and a targeting moiety against Clec9A. In another illustrative embodiment, the Fc-based chimeric protein complex may include a targeting moiety against CD8 and a targeting moiety against CD3. In another illustrative embodiment, the Fc-based chimeric protein complex may include a targeting moiety against CD8 and a targeting moiety against PD-1.

[0827] In one embodiment, the present Fc-based chimeric protein complex comprises one or more targeting moieties directed against a B cell and one or more targeting moieties directed against the same or another B cell. In one embodiment, the present Fc-based chimeric protein complex comprises one or more targeting moieties directed against a B cell and one or more targeting moieties directed against a T cell. In one embodiment, the present Fc-based chimeric protein complex comprises one or more targeting moieties directed against a B cell and one or more targeting moieties directed against a dendritic cell. In one embodiment, the present Fc-based chimeric protein complex comprises one or more targeting moieties against a B cell and one or more targeting moieties directed against a macrophage. In one embodiment, the present Fc-based chimeric protein complex comprises one or more targeting moieties against a B cell and one or more targeting moieties directed against a NK cell.

[0828] In one embodiment, the present Fc-based chimeric protein complex comprises one or more targeting moieties directed against a dendritic cell and one or more targeting moieties directed against the same or another dendritic cell. In one embodiment, the present Fc-based chimeric protein complex comprises one or more targeting moieties directed against a dendritic cell and one or more targeting moieties directed against a T cell. In one embodiment, the present Fc-based chimeric protein complex comprises one or more targeting moieties directed against a dendritic cell and one or more targeting moieties directed against a B cell. In one embodiment, the present Fc-based chimeric protein complex comprises one or more targeting moieties against a dendritic cell and one or more targeting moieties directed against a macrophage. In one embodiment, the present Fc-based chimeric protein complex comprises one or more targeting moieties against a dendritic cell and one or more targeting moieties directed against a NK cell.

[0829] In one embodiment, the present Fc-based chimeric protein complex comprises one or more targeting moieties directed against a macrophage and one or more targeting moieties directed against the same or another macrophage. In one embodiment, the present Fc-based chimeric protein complex comprises one or more targeting moieties directed against a macrophage and one or more targeting moieties directed against a T cell. In one embodiment, the present Fc-based chimeric protein complex comprises one or more targeting moieties directed against a macrophage and one or more targeting moieties directed against a B cell. In one embodiment, the present Fc-based chimeric protein complex comprises one or more targeting moieties against a macrophage and one or more targeting moieties directed against a dendritic cell. In one embodiment, the present Fc-based chimeric protein complex comprises one or more targeting moieties against a macrophage and one or more targeting moieties directed against a NK cell.

[0830] In one embodiment, the present Fc-based chimeric protein complex comprises one or more targeting moieties directed against an NK cell and one or more targeting moieties directed against the same or another NK cell. In one embodiment, the present Fc-based chimeric protein complex comprises one or more targeting moieties directed against an NK cell and one or more targeting moieties directed against a T cell. In one embodiment, the present Fc-based chimeric protein complex comprises one or more targeting moieties directed against an NK cell and one or more targeting moieties directed against a B cell. In one embodiment, the present Fc-based chimeric protein complex comprises one or more targeting moieties against an NK cell and one or more targeting moieties directed against a macrophage. In one embodiment, the present Fc-based chimeric protein complex comprises one or more targeting moieties against an NK cell and one or more targeting moieties directed against a dendritic cell.

[0831] In one embodiment, the present Fc-based chimeric protein complex comprises a targeting moiety directed against a tumor cell and a second targeting moiety directed against the same or a different tumor cell. In such embodiments, the targeting moieties may bind to any of the tumor antigens described herein.

[0832] In some embodiments, the Fc-based chimeric protein complex of the invention comprises one or more targeting moieties having recognition domains that bind to a target (e.g. antigen, receptor) of interest including those found on one or more cells selected from adipocytes (e.g., white fat cell, brown fat cell), liver lipocytes, hepatic cells, kidney cells (e.g., kidney parietal cell, kidney salivary gland, mammary gland, etc.), duct cells (of seminal vesicle, prostate gland, etc.), intestinal brush border cells (with microvilli), exocrine gland striated duct cells, gall bladder epithelial cells, ductulus efferens nonciliated cells, epididymal principal cells, epididymal basal cells, endothelial cells, ameloblast epithelial cells (tooth enamel secretion), planum semilunatum epithelial cells of vestibular system of ear (proteoglycan secretion), organ of Corti interdental epithelial cells (secreting tectorial membrane covering hair cells), loose connective tissue fibroblasts, corneal fibroblasts (corneal keratocytes), tendon fibroblasts, bone marrow reticular tissue fibroblasts, nonepithelial fibroblasts, pericytes, nucleus pulposus cells of intervertebral disc, cementoblasts/cementocytes (tooth root bonelike ewan cell secretion), odontoblasts/odontocytes (tooth dentin secretion), hyaline cartilage chondrocytes, fibrocartilage chondrocytes, elastic cartilage chondrocytes, osteoblasts/osteocytes, osteoprogenitor cells (stem cell of osteoblasts), hyalocytes of vitreous body of eye, stellate cells of perilymphatic space of ear, hepatic stellate cells (Ito cell), pancreatic stelle cells, skeletal muscle cells, satellite cells, heart muscle cells, smooth muscle cells, myoepithelial cells of iris, myoepithelial cells of exocrine glands, exocrine secretory epithelial cells (e.g., salivary gland cells, mammary gland cells, lacrimal gland cells, sweat gland cells, sebaceious gland cells, prostate gland cells, gastric glad cells, pancreatic acinar cells, pneumocytes), a hormone secreting cells (e.g., pituitary cells, neurosecretory cells, gut and respiratory tract cells, thyroid gland cells, parathyroid glad cells, adrenal gland cells, Leydig cells of testes, pancreatic islet cells), keratinizing epithelial cells, wet stratified barrier epithelial cells, neuronal cells (e.g., sensory transducer cells, autonomic neuron cells, sense organ and peripheral neuron supporting cells, and central nervous system neurons and glial cells such as interneurons, principal cells, astrocytes, oligodendrocytes, and ependymal cells).

### Fc-Based Chimeric Protein Complexes

[0833] In embodiments. the Fc-based chimeric protein complexes of the present technology comprise at least one Fc domain disclosed herein, at least one signaling agent (SA) disclosed herein, and at least one targeting moiety (TM) disclosed herein.

[0834] It is understood that, the present Fc-based chimeric protein complexes may encompass a complex of two fusion proteins.

[0835] In some embodiments, the Fc-based chimeric protein complex is heterodimeric. In some embodiments, the heterodimeric Fc-based chimeric protein complex has a trans orientation/configuration. In some embodiments, the heterodimeric Fc-based chimeric protein complex has a cis orientation/configuration. In some embodiments, the heterodimeric Fc-based chimeric protein complex does not comprise the signaling agent and targeting moiety on a single polypeptide. In some embodiments, the signaling agent and targeting moiety are on the same end (N-terminus or C-terminus) of the Fc domain or the Fc chains thereof. In some embodiments, the signaling agent and targeting moiety are on different ends (N-terminus or C-terminus) of the Fc domain or the Fc chains thereof.

[0836] In some embodiments, the Fc-based chimeric protein has an improved in vivo half-life relative to a chimeric protein lacking an Fc or a chimeric protein which is not a heterodimeric complex. In some embodiments, the Fc-based chimeric protein has an improved solubility, stability and other pharmacological properties relative to a chimeric protein lacking an Fc or a chimeric protein which is not a heterodimeric complex.

[0837] Heterodimeric Fc-based chimeric protein complexes are composed of two different polypeptides. In embodiments described herein, the targeting domain is on a different polypeptide than the signaling agent and accordingly, proteins that contain only one targeting domain copy, and also only one signaling agent copy can be made (this provides a configuration in which potential interference with desired properties can be controlled). Further, in embodiments, one targeting domain (e.g. VHH) only can avoid cross-linking of the antigen on the cell surface (which could elicit undesired effects in some cases) Further, in embodiments, one signaling agent may alleviate molecular “crowding” and potential interference with avidity mediated restoration of effector function in dependence of the targeting domain. Further, in embodiments, heterodimeric Fc-based chimeric protein complexes can have two targeting moieties and these can be placed on the two different polypeptides. For instance, in embodiments, the C-terminus of both targeting moieties (e.g. VHHs) can be masked to avoid potential autoantibodies or pre-existing antibodies (e.g. VHH autoantibodies or pre-existing antibodies). Further, in embodiments, heterodimeric Fc-based chimeric protein complexes, e.g. with the targeting domain on a different polypeptide than the signaling agent (e.g. wild type signaling agent), may favor “cross-linking” of two cell types (e.g. a tumor cell and an immune cell). Further, in embodiments, heterodimeric Fc-based chimeric protein complexes can have two signaling agents, each on different polypeptides to allow more complex effector responses (e.g. with any two of the signaling agents described herein, by way of illustration IFN alpha2 and TNF).

[0838] Further, in embodiments, heterodimeric Fc-based chimeric protein complexes, e.g. with the targeting domain on a different polypeptide than the signaling agent, combinatorial diversity of targeting moiety and signaling agent is provided in a practical manner. For instance, in embodiments, polypeptides with any of the targeting moieties described herein can be combined “off the shelf” with polypeptides with any of the signaling agents described herein to allow rapid generation of various combinations of targeting moieties and signaling agents in single Fc-based chimeric protein complexes.

[0839] In some embodiments, the Fc-based chimeric protein complex comprises one or more linkers. In some embodiments, the Fc-based chimeric protein complex includes a linker that connects the Fc domain, signaling agent(s) and targeting moiety(ies). In some embodiments, the Fc-based chimeric protein complex includes a linker that connects each signaling agent and targeting moiety (or, if more than one targeting moiety, a signaling agent to one of the targeting moieties). In some embodiments, the Fc-based chimeric protein complex includes a linker that connects each signaling agent to the Fc domain. In some embodiments, the Fc-based chimeric protein complex includes a linker that connects each targeting moiety to the Fc domain. In some embodiments, the Fc-based chimeric protein complex includes a linker that connects a targeting moiety to another targeting moiety. In some embodiments, the Fc-based chimeric protein complex includes a linker that connects a signaling agent to another signaling agent.

[0840] In some embodiments, an Fc-based chimeric protein complex comprises two or more targeting moieties. In such embodiments, the targeting moieties can be the same targeting moiety or they can be different targeting moieties.

[0841] In some embodiments, an Fc-based chimeric protein complex comprises two or more signaling agents. In such embodiments, the signaling agents can be the same targeting moiety or they can be different targeting moieties.

[0842] By way of example, in some embodiments, the Fc-based chimeric protein complex comprise an Fc domain, at least two signaling agents (SA), and at least two targeting moieties (TM), wherein the Fc domain, signaling agents, and targeting moieties are selected from any of the Fc domains, signaling agents, and targeting moieties disclosed herein. In some embodiments, the Fc domain is homodimeric.

[0843] In various embodiments, the Fc-based chimeric protein complex takes the form of any of the schematics of FIGS. 1A-F.

[0844] In various embodiments, the Fc-based chimeric protein complex takes the form of any of the schematics of FIGS. 2A-H.

[0845] In various embodiments, the Fc-based chimeric protein complex takes the form of any of the schematics of FIGS. 3A-H.

[0846] In various embodiments, the Fc-based chimeric protein complex takes the form of any of the schematics of FIGS. 4A-D.

[0847] In various embodiments, the Fc-based chimeric protein complex takes the form of any of the schematics of FIGS. 5A-F.

[0848] In various embodiments, the Fc-based chimeric protein complex takes the form of any of the schematics of FIGS. 6A-J.

[0849] In various embodiments, the Fc-based chimeric protein complex takes the form of any of the schematics of FIGS. 7A-D.

[0850] In various embodiments, the Fc-based chimeric protein complex takes the form of any of the schematics of FIG. 7B.

[0851] In various embodiments, the Fc-based chimeric protein complex takes the form of any of the schematics of FIGS. 8A-F.

[0852] In various embodiments, the Fc-based chimeric protein complex takes the form of any of the schematics of FIGS. 9A-J.

[0853] In various embodiments, the Fc-based chimeric protein complex takes the form of any of the schematics of FIGS. 10A-F.

[0854] In various embodiments, the Fc-based chimeric protein complex takes the form of any of the schematics of FIGS. 11A-L.

[0855] In various embodiments, the Fc-based chimeric protein complex takes the form of any of the schematics of FIGS. 12A-L.

[0856] In various embodiments, the Fc-based chimeric protein complex takes the form of any of the schematics of FIGS. 13A-F.

[0857] In various embodiments, the Fc-based chimeric protein complex takes the form of any of the schematics of FIGS. 14A-L.

[0858] In various embodiments, the Fc-based chimeric protein complex takes the form of any of the schematics of FIGS. 15A-L.

[0859] In various embodiments, the Fc-based chimeric protein complex takes the form of any of the schematics of FIGS. 16A-J.

[0860] In various embodiments, the Fc-based chimeric protein complex takes the form of any of the schematics of FIGS. 17A-J.

[0861] In various embodiments, the Fc-based chimeric protein complex takes the form of any of the schematics of FIGS. 18A-F.

[0862] In various embodiments, the Fc-based chimeric protein complex takes the form of any of the schematics of FIGS. 19A-F.

[0863] In various embodiments, the Fc-based chimeric protein complex takes the form of any of the schematics of FIGS. 20A-E.

[0864] In some embodiments, the signaling agents are linked to the targeting moieties and the targeting moieties are linked to the Fc domain on the same terminus (see FIGS. 1A-F). In some embodiments, the Fc domain is homodimeric.

[0865] In some embodiments, the signaling agents and targeting moieties are linked to the Fc domain, wherein the targeting moieties and signaling agents are linked on the same terminus (see FIGS. 1A-F). In some embodiments, the Fc domain is homodimeric.

[0866] In some embodiments, the targeting moieties are linked to signaling agents and the signaling agents are linked to the Fc domain on the same terminus (see FIGS. 1A-F). In some embodiments, the Fc domain is homodimeric.

[0867] In some embodiments, the homodimeric Fc-based chimeric protein complex has two or more targeting moieties.

[0868] In some embodiments, there are four targeting moieties and two signaling agents, the targeting moieties are linked to the Fc domain and the signaling agents are linked to targeting moieties on the same terminus (see FIGS. 2A-H). In some embodiments, the Fc domain is homodimeric. In some embodiments, where there are four targeting moieties and two signaling agents, two targeting moieties are linked to the Fc domain and two targeting moieties are linked to the signaling agents, which are linked to the Fc domain on the same terminus (see FIGS. 2A-H). In some embodiments, the Fc domain is homodimeric. In some embodiments, where there are four targeting moieties and two signaling agents, two targeting moieties are linked to each other and one of the targeting moieties of from each pair is linked to the Fc domain on the same terminus and the signaling agents are linked to the Fc domain on the same terminus (see FIGS. 2A-H). In some embodiments, the Fc domain is homodimeric. In some embodiments, where there are four targeting moieties and two signaling agents, two targeting moieties are linked to each other, wherein one of the targeting moieties of from each pair is linked to a signaling agent and the other targeting moiety of the pair is linked the Fc domain, wherein the targeting moieties linked to the Fc domain are linked on the same terminus (see FIGS. 2A-H). In some embodiments, the Fc domain is homodimeric.

[0869] In some embodiments, the homodimeric Fc-based chimeric protein complex has two or more signaling agents. In some embodiments, where there are four signaling agents and two targeting moieties, two signaling agents are linked to each other and one of the signaling agents of from pair is linked to the Fc domain on the same terminus and the targeting moieties are linked to the Fc domain on the same terminus (see FIGS. 3A-H). In some embodiments, the Fc domain is homodimeric. In some embodiments, where there are four signaling agents and two targeting moieties, two signaling agents are linked to the Fc domain one the same terminus and two of the signaling agents are each linked to a targeting moiety, wherein the targeting moieties are linked to the Fc domain at the same terminus (see FIGS. 3A-H). In some embodiments, the Fc domain is homodimeric. In some embodiments, where there are four signaling agents and two targeting moieties, two signaling agents are linked to each other and one of the signaling agents of from pair is linked to a targeting moiety and the targeting moieties are linked to the Fc domain on the same terminus (see FIGS. 3A-H). In some embodiments, the Fc domain is homodimeric.

[0870] By way of example, in some embodiments, the Fc-based chimeric protein complex comprise an Fc domain, wherein the Fc domain comprises ionic pairing mutation(s) and/or knob-in-hole mutation(s), at least one signaling agent, and at least one targeting moiety, wherein the ionic pairing motif and/or a knob-in-hole motif, signaling agent, and targeting moiety are selected from any of the ionic pairing motif and/or a knob-in-hole motif, signaling agents, and targeting moieties disclosed herein. In some embodiments, the Fc domain is heterodimeric. In some embodiments, the Fc domain comprises a mutation that reduces or eliminates its effector function.

[0871] In some embodiments, the signaling agent is linked to the targeting moiety, which is linked to the Fc domain (see FIGS. 10A-F and 13A-F). In some embodiments, the targeting moiety is linked to the signaling agent, which is linked to the Fc domain (see FIGS. 10A-F and 13A-F). In some embodiments, the Fc domain is heterodimeric. In some embodiments, the Fc domain comprises a mutation that reduces or eliminates its effector function.

[0872] In some embodiments, the signaling agent and targeting moiety are linked to the Fc domain (see FIGS. 4A-D, 7A-D, 10A-F, and 13A-F). In some embodiments, the targeting moiety and the signaling agent are linked to different Fc chains on the same terminus (see FIGS. 4A-D and 7A-D). In some embodiments, the targeting moiety and the signaling agent are linked to different Fc chains on different termini (see FIGS. 4A-D and 7A-D). In some embodiments, the targeting moiety and the signaling agent are linked to the same Fc chain (see FIGS. 10A-F and 13A-F). In some embodiments, the Fc domain is heterodimeric. In some embodiments, the Fc domain comprises a mutation that reduces or eliminates its effector function.

[0873] In some embodiments, where there are one signaling agent and two targeting moieties, the signaling agent is linked to the Fc domain and two targeting moieties can be: 1) linked to each other with one of the targeting moieties linked to the Fc domain; or 2) each linked to the Fc domain (see FIGS. 5A-F, 8A-F, 11A-L, 14A-L, 16A-J, and 17A-J). In some embodiments, the targeting moieties are linked on one Fc chain and the signaling agent is on the other Fc chain (see FIGS. 5A-F and 8A-F). In some embodiments, the paired targeting moieties and the signaling agent are linked to the same Fc chain (see FIGS. 11A-L and 14A-L). In some embodiments, a targeting moiety is linked to the Fc domain and the other targeting moiety is linked to the signaling agent, and the paired targeting moiety is linked to the Fc domain (see FIGS. 11A-L, 14A-L, 16A-J, and 17A-J). In some embodiments, the unpaired targeting moiety and paired targeting moiety are linked to the same Fc chain (see FIGS. 11A-L and 14A-L). In some embodiments, the unpaired targeting moiety and paired targeting moiety are linked to different Fc chains (see FIGS. 16A-J and 17A-J). In some embodiments, the unpaired targeting moiety and paired targeting moiety are linked on the same terminus (see FIGS. 16A-J and 17A-J). In some embodiments, the Fc domain is heterodimeric. In some embodiments, the Fc domain comprises a mutation that reduces or eliminates its effector function.

[0874] In some embodiments, where there are one signaling agent and two targeting moieties, a targeting moiety is linked to the signaling agent, which is linked to the Fc domain, and the unpaired targeting moiety is linked the Fc domain (see FIGS. 11A-L, 14A-L, 16A-J, and 17A-J). In some embodiments, the paired signaling agent and unpaired targeting moiety are linked to the same Fc chain (see FIGS. 11A-L and 14A-L). In some embodiments, the paired signaling agent and unpaired targeting moiety are linked to different Fc chains (see FIGS. 16A-J and 17A-J). In some embodiments, the paired signaling agent and unpaired targeting moiety are linked on the same terminus (see FIGS. 16A-J and 17A-J). In some embodiments, the Fc domain is heterodimeric. In some embodiments, the Fc domain comprises a mutation that reduces or eliminates its effector function.

[0875] In some embodiments, where there are one signaling agent and two targeting moieties, the targeting moieties are linked together and the signaling agent is linked to one of the paired targeting moieties, wherein the targeting moiety not linked to the signaling agent is linked to the Fc domain (see FIGS. 11A-L and 14A-L). In some embodiments, the Fc domain is heterodimeric. In some embodiments, the Fc domain comprises a mutation that reduces or eliminates its effector function.

[0876] In some embodiments, where there are one signaling agent and two targeting moieties, the targeting moieties are linked together and the signaling agent is linked to one of the paired targeting moieties, wherein the signaling agent is linked to the Fc domain (see FIGS. 11A-L and 14A-L). In some embodiments, the Fc domain is heterodimeric.

[0877] In some embodiments, the Fc domain comprises a mutation that reduces or eliminates its effector function.

[0878] In some embodiments, where there are one signaling agent and two targeting moieties, the targeting moieties are both linked to the signaling agent, wherein one of the targeting moieties is linked to the Fc domain (see FIGS. 11A-L and 14A-L). In some embodiments, the Fc domain is heterodimeric. In some embodiments, the Fc domain comprises a mutation that reduces or eliminates its effector function.

[0879] In some embodiments, where there are one signaling agent and two targeting moieties, the targeting moieties and the signaling agent are linked to the Fc domain (see FIGS. 16A-J and 17A-J). In some embodiments, the targeting moieties are linked on the terminus (see FIGS. 16A-J and 17A-J). In some embodiments, the Fc domain is heterodimeric. In some embodiments, the Fc domain comprises a mutation that reduces or eliminates its effector function.

[0880] In some embodiments, where there are two signaling agents and one targeting moiety, the signaling agents are linked to the Fc domain on the same terminus and the targeting moiety is linked to the Fc domain (see FIGS. 6A-J and 9A-J). In some embodiments, the signaling agents are linked to the Fc domain on the same Fc chain and the targeting moiety is linked on the other Fc chain (see FIGS. 18A-F and 19A-F). In some embodiments, the Fc domain is heterodimeric. In some embodiments, the Fc domain comprises a mutation that reduces or eliminates its effector function.

[0881] In some embodiments, where there are two signaling agents and one targeting moiety, a signaling agent is linked to the targeting moiety, which is linked to the Fc domain and the other signaling agent is linked to the Fc domain (see FIGS. 6A-J, 9A-J, 12A-L, and 15A-L). In some embodiments, the targeting moiety and the unpaired signaling agent are linked to different Fc chains (see FIGS. 6A-J and 9A-J). In some embodiments, the targeting moiety and the unpaired signaling agent are linked to different Fc chains on the same terminus (see FIGS. 6A-J and 9A-J). In some embodiments, the targeting moiety and the unpaired signaling agent are linked to different Fc chains on different termini (see FIGS. 6A-J and 9A-J). In some embodiments, the targeting moiety and the unpaired signaling agent are linked to the same Fc chains (see FIGS. 12A-L and 15A-L). In some embodiments, the Fc domain is heterodimeric. In some embodiments, the Fc domain comprises a mutation that reduces or eliminates its effector function.

[0882] In some embodiments, where there are two signaling agents and one targeting moiety, the targeting moiety is linked to a signaling agent, which is linked to the Fc domain and the other signaling agent is linked to the Fc domain (see FIGS. 6A-J and 9A-J). In some embodiments, the paired signaling agent and the unpaired signaling agent are linked to different Fc chains (see FIGS. 6A-J and 9A-J). In some embodiments, the paired signaling agent and the unpaired signaling agent are linked to different Fc chains on the same terminus (see FIGS. 6A-J and 9A-J). In some embodiments, the paired signaling agent and the unpaired signaling agent are linked to different Fc chains on different termini (see FIGS. 6A-J and 9A-J). In some embodiments, the Fc domain is heterodimeric. In some embodiments, the Fc domain comprises a mutation that reduces or eliminates its effector function.

[0883] In some embodiments, where there are two signaling agents and one targeting moiety, the signaling agents are linked together and the targeting moiety is linked to one of the paired signaling agents, wherein the targeting moiety is linked to the Fc domain (see FIGS. 12A-L and 15A-L). In some embodiments, the Fc domain is heterodimeric.

[0884] In some embodiments, the Fc domain comprises a mutation that reduces or eliminates its effector function.

[0885] In some embodiments, where there are two signaling agents and one targeting moiety, the signaling agents are linked together and one of the signaling agents is linked to the Fc domain and the targeting moiety is linked to the Fc domain (see FIGS. 12A-L, 15A-L, 18A-F, and 19A-F). In some embodiments, the paired signaling agents and targeting moiety are linked to the same Fc chain (see FIGS. 12A-L and 15A-L). In some embodiments, the paired signaling agents and targeting moiety are linked to different Fc chains (see FIGS. 18A-F and 19A-F). In some embodiments, the paired signaling agents and targeting moiety are linked to different Fc chains on the same terminus (see FIGS. 18A-F and 19A-F). In some embodiments, the Fc domain is heterodimeric. In some embodiments, the Fc domain comprises a mutation that reduces or eliminates its effector function.

[0886] In some embodiments, where there are two signaling agents and one targeting moiety, the signaling agents are both linked to the targeting moiety, wherein one of the signaling agents is linked to the Fc domain (see FIGS. 12A-L and 15A-L). In some embodiments, the Fc domain is heterodimeric. In some embodiments, the Fc domain comprises a mutation that reduces or eliminates its effector function.

[0887] In some embodiments, where there are two signaling agents and one targeting moiety, the signaling agents are linked together and one of the signaling agents is linked to the targeting moiety and the other signaling agent is linked to the Fc domain (see FIGS. 12A-L and 15A-L).

[0888] In some embodiments, where there are two signaling agents and one targeting moiety, each signaling agent is linked to the Fc domain and the targeting moiety is linked to one of the signaling agents (see FIGS. 12A-L and 15A-L). In some embodiments, the signaling agents are linked to the same Fc chain (see FIGS. 12A-L and 15A-L).

[0889] In some embodiments, a targeting moiety or signaling agent is linked to the Fc domain, comprising one or both of C_{H}2 and C_{H}3 domains, and optionally a hinge region. For example, vectors encoding the targeting moiety, signaling agent, or combination thereof, linked as a single nucleotide sequence to an Fc domain can be used to prepare such polypeptides.

[0890] In some embodiments, the linker may be utilized to link various functional groups, residues, or moieties as described herein to the Fc-based chimeric protein complex. In some embodiments, the linker is a single amino acid or a plurality of amino acids that does not affect or reduce the stability, orientation, binding, neutralization, and/or clearance characteristics of the binding regions and the binding protein. In various embodiments, the linker is selected from a peptide, a protein, a sugar, or a nucleic acid.

[0891] In some embodiments, the Fc-based chimeric protein complex comprises a linker connecting a targeting moiety and the signaling agent. In some embodiments, the Fc-based chimeric protein complex comprises a linker within the signaling agent (e.g. in the case of single chain TNF, which can comprise two linkers to yield a trimer or in the case of IFN gamma, which can comprise a linkers to yield a dimer).

[0892] The present technology contemplates the use of a variety of linker sequences. In various embodiments, the linker may be derived from naturally-occurring multi-domain proteins or are empirical linkers as described, for example, in Chichili et al., (2013), Protein Sci. 22(2):153-167, Chen et al., (2013), Adv Drug Deliv Rev. 65(10):1357-1369, the entire contents of which are hereby incorporated by reference. In some embodiments, the linker may be designed using linker designing databases and computer programs such as those described in Chen et al., (2013), Adv Drug Deliv Rev. 65(10):1357-1369 and Crasto et al., (2000), Protein Eng. 13(5):309-312, the entire contents of which are hereby incorporated by reference. In various embodiments, the linker may be functional. For example, without limitation, the linker may function to improve the folding and/or stability, improve the expression, improve the pharmacokinetics, and/or improve the bioactivity of the Fc-based chimeric protein complex

[0893] In some embodiments, the linker is a polypeptide. In some embodiments, the linker is less than about 100 amino acids long. For example, the linker may be less than about 100, about 95, about 90, about 85, about 80, about 75, about 70, about 65, about 60, about 55, about 50, about 45, about 40, about 35, about 30, about 25, about 20, about 19, about 18, about 17, about 16, about 15, about 14, about 13, about 12, about 11, about 10, about 9, about 8, about 7, about 6, about 5, about 4, about 3, or about 2 amino acids long. In some embodiments, the linker is a polypeptide. In some embodiments, the linker is greater than about 100 amino acids long. For example, the linker may be greater than about 100, about 95, about 90, about 85, about 80, about 75, about 70, about 65, about 60, about 55, about 50, about 45, about 40, about 35, about 30, about 25, about 20, about 19, about 18, about 17, about 16, about 15, about 14, about 13, about 12, about 11, about 10, about 9, about 8, about 7, about 6, about 5, about 4, about 3, or about 2 amino acids long. In some embodiments, the linker is flexible. In another embodiment, the linker is rigid.

[0894] In some embodiments, the linker length allows for efficient binding of a targeting moiety, a signaling agent, and/or an Fc domain to their targets (e.g., receptors). For instance, in some embodiments, the linker length allows for efficient binding of one of the targeting moieties and the signaling agent to receptors on the same cell as well as the efficient binding of the other targeting moiety to another cell. Illustrative pairs of cells are provided elsewhere herein.

[0895] In some embodiments the linker length is at least equal to the minimum distance between the binding sites of a targeting moiety, a signaling agent, and/or an Fc domain targets (e.g., receptors) on the same cell. In some embodiments the linker length is at least twice, or three times, or four times, or five times, or ten times, or twenty times, or 25 times, or 50 times, or one hundred times, or more the minimum distance between the binding sites of a targeting moiety, a signaling agent, and/or an Fc domain targets on the same cell.

[0896] In some embodiments, a linker connects the two targeting moieties to each other and this linker has a short length and a linker connects a targeting moiety and a signaling agent this linker is longer than the linker connecting the two targeting moieties. For example, the difference in amino acid length between the linker connecting the two targeting moieties and the linker connecting a targeting moiety and a signaling agent may be about 100, about 95, about 90, about 85, about 80, about 75, about 70, about 65, about 60, about 55, about 50, about 45, about 40, about 35, about 30, about 25, about 20, about 19, about 18, about 17, about 16, about 15, about 14, about 13, about 12, about 11, about 10, about 9, about 8, about 7, about 6, about 5, about 4, about 3, or about 2 amino acids.

[0897] In some embodiments, the linker is flexible. In another embodiment, the linker is rigid.

[0898] In various embodiments, the linker is substantially comprised of glycine and serine residues (e.g. about 30%, or about 40%, or about 50%, or about 60%, or about 70%, or about 80%, or about 90%, or about 95%, or about 97% glycines and serines). For example, in some embodiments, the linker is (Gly₄Ser)ₙ, where n is from about 1 to about 8, e.g. 1, 2, 3, 4, 5, 6, 7, or 8 (SEQ ID NO: 1283-SEQ ID NO: 1290, respectively). In an embodiment, the linker sequence is GGSGGSGGGGSGGGGS (SEQ ID NO: 1291). Additional illustrative linkers include, but are not limited to, linkers having the sequence LE, GGGGS (SEQ ID NO: 1283), (GGGGS)ₙ (n=1-7) (SEQ ID NO: 1283-SEQ ID NO: 1289), (Gly)₈ (SEQ ID NO: 1292), (Gly)₆ (SEQ ID NO: 1293), (EAAAK)ₙ (n=1-3) (SEQ ID NO: 1294-SEQ ID NO: 1296), A(EAAAK)ₙA (n=2-5) (SEQ ID NO: 1297-SEQ ID NO: 1300), AEAAAKEAAAKA (SEQ ID NO: 1297), A(EAAAK)₄ALEA(EAAAK)₄A (SEQ ID NO: 1301), PAPAP (SEQ ID NO: 1302), KESGSVSSEQLAQFRSLD (SEQ ID NO: 1303), EGKSSGSGSESKST (SEQ ID NO: 1304), GSAGSAAGSGEF (SEQ ID NO: 1305), and (XP)ₙ, with X designating any amino acid, e.g., Ala, Lys, or Glu. In various embodiments, the linker is GGS or (GGS)ₙ, (n=2-20) (SEQ ID NO: 1306-SEQ ID NO: 1324). In some embodiments, the linker is G. In some embodiments, the linker is MA. In some embodiments, the linker is (GGGGS)ₙ (n=9-20) (SEQ ID NO: 1325-SEQ ID NO: 1336).

[0899] In some embodiments, the linker is one or more of GGGSE (SEQ ID NO: 1337), GSESG (SEQ ID NO: 1338), GSEGS (SEQ ID NO: 1339), GEGGSGEGSSGEGSSSEGGGSEGGGSEGGGSEGGS (SEQ ID NO: 1340), and a linker of randomly placed G, S, and E every 4 amino acid intervals.

[0900] In some embodiments, the linker is a hinge region of an antibody (e.g., of IgG, IgA, IgD, and IgE, inclusive of subclasses (e.g. IgG1, IgG2, IgG3, and IgG4, and IgA1 and IgA2)). In various embodiments, the linker is a hinge region of an antibody (e.g., of IgG, IgA, IgD, and IgE, inclusive of subclasses (e.g. IgG1, IgG2, IgG3, and IgG4, and IgA1 and IgA2)). The hinge region, found in IgG, IgA, IgD, and IgE class antibodies, acts as a flexible spacer, allowing the Fab portion to move freely in space. In contrast to the constant regions, the hinge domains are structurally diverse, varying in both sequence and length among immunoglobulin classes and subclasses. For example, the length and flexibility of the hinge region varies among the IgG subclasses. The hinge region of IgG1 encompasses amino acids 216-231 and, because it is freely flexible, the Fab fragments can rotate about their axes of symmetry and move within a sphere centered at the first of two inter-heavy chain disulfide bridges. IgG2 has a shorter hinge than IgG1, with 12 amino acid residues and four disulfide bridges. The hinge region of IgG2 lacks a glycine residue, is relatively short, and contains a rigid poly-proline double helix, stabilized by extra inter-heavy chain disulfide bridges. These properties restrict the flexibility of the IgG2 molecule. IgG3 differs from the other subclasses by its unique extended hinge region (about four times as long as the IgG1 hinge), containing 62 amino acids (including 21 prolines and 11 cysteines), forming an inflexible poly-proline double helix. In IgG3, the Fab fragments are relatively far away from the Fc fragment, giving the molecule a greater flexibility. The elongated hinge in IgG3 is also responsible for its higher molecular weight compared to the other subclasses. The hinge region of IgG4 is shorter than that of IgG1 and its flexibility is intermediate between that of IgG1 and IgG2. The flexibility of the hinge regions reportedly decreases in the order IgG3>IgG1>IgG4>IgG2.

[0901] According to crystallographic studies, the immunoglobulin hinge region can be further subdivided functionally into three regions: the upper hinge region, the core region, and the lower hinge region. See Shin et al., 1992 Immunological Reviews 130:87. The upper hinge region includes amino acids from the carboxyl end of CH1 to the first residue in the hinge that restricts motion, generally the first cysteine residue that forms an interchain disulfide bond between the two heavy chains. The length of the upper hinge region correlates with the segmental flexibility of the antibody. The core hinge region contains the inter-heavy chain disulfide bridges, and the lower hinge region joins the amino terminal end of the CH2 domain and includes residues in CH2. Id. The core hinge region of wild-type human IgG1 contains the sequence Cys-Pro-Pro-Cys (SEQ ID NO: 1341), which when dimerized by disulfide bond formation, results in a cyclic octapeptide believed to act as a pivot, thus conferring flexibility. In various embodiments, the linker comprises, one, or two, or three of the upper hinge region, the core region, and the lower hinge region of any antibody (e.g., of IgG, IgA, IgD, and IgE, inclusive of subclasses (e.g. IgG1, IgG2, IgG3, and IgG4, and IgA1 and IgA2)). The hinge region may also contain one or more glycosylation sites, which include a number of structurally distinct types of sites for carbohydrate attachment. For example, IgA1 contains five glycosylation sites within a 17-amino-acid segment of the hinge region, conferring resistance of the hinge region polypeptide to intestinal proteases, considered an advantageous property for a secretory immunoglobulin. In various embodiments, the linker of the present invention comprises one or more glycosylation sites. In various embodiments, the linker is a hinge-CH2-CH3 domain of a human IgG4 antibody.

[0902] In some embodiments, the linker is a synthetic linker such as PEG.

[0903] In various embodiments, the linker may be functional. For example, without limitation, the linker may function to improve the folding and/or stability, improve the expression, improve the pharmacokinetics, and/or improve the bioactivity of the Fc-based chimeric protein complex. In another example, the linker may function to target the Fc-based chimeric protein complex to a particular cell type or location.

### Functional Groups

[0904] In some embodiments, the Fc-based chimeric protein complex of the present technology includes one or more functional groups, residues, or moieties. In various embodiments, the one or more functional groups, residues, or moieties are attached or genetically fused to any of the Fc-proteins, the signaling agents, and the targeting moieties described herein. In some embodiments, such functional groups, residues or moieties confer one or more desired properties or functionalities to the Fc-based chimeric protein complex of the present technology. Examples of such functional groups and of techniques for introducing them into the Fc-based chimeric protein complex are known in the art, for example, see Remington's Pharmaceutical Sciences, 16th ed., Mack Publishing Co., Easton, Pa. (1980).

[0905] In various embodiments, the Fc-based chimeric protein complex may by conjugated and/or fused with another agent to extend half-life or otherwise improve pharmacodynamic and pharmacokinetic properties. For example, in some embodiments, the Fc-based chimeric protein complex may be fused or conjugated with one or more of PEG, XTEN (e.g., as rPEG), polysialic acid (POLYXEN), albumin (e.g., human serum albumin or HSA), elastin-like protein (ELP), PAS, HAP, GLK, CTP, transferrin, and the like.

[0906] In some embodiments, the functional groups, residues, or moieties comprise a suitable pharmacologically acceptable polymer, such as poly(ethyleneglycol) (PEG) or derivatives thereof (such as methoxypoly(ethyleneglycol) or mPEG). In some embodiments, attachment of the PEG moiety increases the half-life and/or reduces the immunogenecity of the Fc-based chimeric protein complex. Generally, any suitable form of pegylation can be used, such as the pegylation used in the art for antibodies and antibody fragments (including but not limited to single domain antibodies such as VHHs); see, for example, Chapman, Nat. Biotechnol., 54, 531-545 (2002); by Veronese and Harris, Adv. Drug Deliv. Rev. 54, 453-456 (2003), by Harris and Chess, Nat. Rev. Drug. Discov., 2, (2003) and in WO04060965, the entire contents of which are hereby incorporated by reference. Various reagents for pegylation of proteins are also commercially available, for example, from Nektar Therapeutics, USA. In some embodiments, site-directed pegylation is used, in particular via a cysteine-residue (see, for example, Yang et al., Protein Engineering, 16, 10, 761-770 (2003), the entire contents of which is hereby incorporated by reference). For example, for this purpose, PEG may be attached to a cysteine residue that naturally occurs in the Fc-based chimeric protein complex. In some embodiments, the Fc-based chimeric protein complex is modified so as to suitably introduce one or more cysteine residues for attachment of PEG, or an amino acid sequence comprising one or more cysteine residues for attachment of PEG may be fused to the amino- and/or carboxy-terminus of the Fc-based chimeric protein complex, using techniques known in the art.

[0907] In some embodiments, the functional groups, residues, or moieties comprise N-linked or O-linked glycosylation. In some embodiments, the N-linked or O-linked glycosylation is introduced as part of a co-translational and/or post-translational modification.

[0908] In some embodiments, the functional groups, residues, or moieties comprise one or more detectable labels or other signal-generating groups or moieties. Suitable labels and techniques for attaching, using and detecting them are known in the art and, include, but are not limited to, fluorescent labels (such as fluorescein, isothiocyanate, rhodamine, phycoerythrin, phycocyanin, allophycocyanin, o-phthaldehyde, and fluorescamine and fluorescent metals such as Eu or others metals from the lanthanide series), phosphorescent labels, chemiluminescent labels or bioluminescent labels (such as luminal, isoluminol, theromatic acridinium ester, imidazole, acridinium salts, oxalate ester, dioxetane or GFP and its analogs), radio-isotopes, metals, metals chelates or metallic cations or other metals or metallic cations that are particularly suited for use in in vivo, in vitro or in situ diagnosis and imaging, as well as chromophores and enzymes (such as malate dehydrogenase, staphylococcal nuclease, delta-V-steroid isomerase, yeast alcohol dehydrogenase, alpha-glycerophosphate dehydrogenase, triose phosphate isomerase, biotinavidin peroxidase, horseradish peroxidase, alkaline phosphatase, asparaginase, glucose oxidase, beta-galactosidase, ribonuclease, urease, catalase, glucose-VI-phosphate dehydrogenase, glucoamylase and acetylcholine esterase). Other suitable labels include moieties that can be detected using NMR or ESR spectroscopy. Such labeled VHHs and polypeptides of the invention may, for example, be used for in vitro, in vivo or in situ assays (including immunoassays known per se such as ELISA, RIA, EIA and other “sandwich assays,” etc.) as well as in vivo diagnostic and imaging purposes, depending on the choice of the specific label.

[0909] In some embodiments, the functional groups, residues, or moieties comprise a tag that is attached or genetically fused to the Fc-based chimeric protein complex. In some embodiments, the Fc-based chimeric protein complex may include a single tag or multiple tags. The tag for example is a peptide, sugar, or DNA molecule that does not inhibit or prevent binding of the Fc-based chimeric protein complex to at target of interest or any other antigen of interest, such as, e.g., tumor antigens. In various embodiments, the tag is at least about: three to five amino acids long, five to eight amino acids long, eight to twelve amino acids long, twelve to fifteen amino acids long, or fifteen to twenty amino acids long. Illustrative tags are described for example, in U.S. Patent Publication No. US2013/0058962. In some embodiment, the tag is an affinity tag such as glutathione-S-transferase (GST) and histidine (His) tag. In an embodiment, the Fc-based chimeric protein complex comprises a His tag.

[0910] In some embodiments, the functional groups, residues, or moieties comprise a chelating group, for example, to chelate one of the metals or metallic cations. Suitable chelating groups, for example, include, without limitation, diethyl-enetriaminepentaacetic acid (DTPA) or ethylenediaminetetraacetic acid (EDTA).

[0911] In some embodiments, the functional groups, residues, or moieties comprise a functional group that is one part of a specific binding pair, such as the biotin-(strept)avidin binding pair. Such a functional group may be used to link the Fc-based chimeric protein complex to another protein, polypeptide or chemical compound that is bound to the other half of the binding pair, i.e., through formation of the binding pair. For example, an Fc-based chimeric protein complex may be conjugated to biotin, and linked to another protein, polypeptide, compound or carrier conjugated to avidin or streptavidin. For example, such a conjugated Fc-based chimeric protein complex may be used as a reporter, for example, in a diagnostic system where a detectable signal-producing agent is conjugated to avidin or streptavidin. Such binding pairs may, for example, also be used to bind the Fc-based chimeric protein complex to a carrier, including carriers suitable for pharmaceutical purposes. One non-limiting example are the liposomal formulations described by Cao and Suresh, Journal of Drug Targeting, 8, 4, 257 (2000). Such binding pairs may also be used to link a therapeutically active agent to the Fc-based chimeric protein complex.

### Modifications and Production of Fc-Based Chimeric Protein Complex

[0912] In various embodiments, the Fc-based chimeric protein complex comprises a targeting moiety that is a VHH. In various embodiments, the VHH is not limited to a specific biological source or to a specific method of preparation. For example, the VHH can generally be obtained: (1) by isolating the V_{H}H domain of a naturally occurring heavy chain antibody; (2) by expression of a nucleotide sequence encoding a naturally occurring V_{H}H domain; (3) by “humanization” of a naturally occurring V_{H}H domain or by expression of a nucleic acid encoding a such humanized V_{H}H domain; (4) by “camelization” of a naturally occurring VH domain from any animal species, such as from a mammalian species, such as from a human being, or by expression of a nucleic acid encoding such a camelized VH domain; (5) by “camelization” of a “domain antibody” or “Dab” as described in the art, or by expression of a nucleic acid encoding such a camelized VH domain; (6) by using synthetic or semi-synthetic techniques for preparing proteins, polypeptides or other amino acid sequences known in the art; (7) by preparing a nucleic acid encoding a VHH using techniques for nucleic acid synthesis known in the art, followed by expression of the nucleic acid thus obtained; and/or (8) by any combination of one or more of the foregoing.

[0913] In an embodiment, the Fc-based chimeric protein complex comprises a VHH that corresponds to the VHH domains of naturally occurring heavy chain antibodies directed against a target of interest. In some embodiments, such VHH sequences can generally be generated or obtained by suitably immunizing a species of Camelid with a molecule of based on the target of interest (e.g., XCR1, Clec9A, CD8, SIRP1α, FAP, etc.) (i.e., so as to raise an immune response and/or heavy chain antibodies directed against the target of interest), by obtaining a suitable biological sample from the Camelid (such as a blood sample, or any sample of B-cells), and by generating V_{H}H sequences directed against the target of interest, starting from the sample, using any suitable known techniques. In some embodiments, naturally occurring V_{H}H domains against the target of interest can be obtained from naive libraries of Camelid VHH sequences, for example, by screening such a library using the target of interest or at least one part, fragment, antigenic determinant or epitope thereof using one or more screening techniques known in the art. Such libraries and techniques are, for example, described in WO9937681, WO0190190, WO03025020 and WO03035694, the entire contents of which are hereby incorporated by reference. In some embodiments, improved synthetic or semi-synthetic libraries derived from naive V_{H}H libraries may be used, such as V_{H}H libraries obtained from naive V_{H}H libraries by techniques such as random mutagenesis and/or CDR shuffling, as for example, described in WO0043507, the entire contents of which are hereby incorporated by reference. In some embodiments, another technique for obtaining VHH sequences directed against a target of interest involves suitably immunizing a transgenic mammal that is capable of expressing heavy chain antibodies (i.e., so as to raise an immune response and/or heavy chain antibodies directed against the target of interest), obtaining a suitable biological sample from the transgenic mammal (such as a blood sample, or any sample of B-cells), and then generating V_{H}H sequences directed against XCR1 starting from the sample, using any suitable known techniques. For example, for this purpose, the heavy chain antibody-expressing mice and the further methods and techniques described in WO02085945 and in WO04049794 (the entire contents of which are hereby incorporated by reference) can be used.

[0914] In an embodiment, the Fc-based chimeric protein complex comprises a VHH that has been “humanized” i.e., by replacing one or more amino acid residues in the amino acid sequence of the naturally occurring V_{H}H sequence (and in particular in the framework sequences) by one or more of the amino acid residues that occur at the corresponding position(s) in a VH domain from a conventional 4-chain antibody from a human being. This can be performed using humanization techniques known in the art. In some embodiments, possible humanizing substitutions or combinations of humanizing substitutions may be determined by methods known in the art, for example, by a comparison between the sequence of a VHH and the sequence of a naturally occurring human VH domain. In some embodiments, the humanizing substitutions are chosen such that the resulting humanized VHHs still retain advantageous functional properties. Generally, as a result of humanization, the VHHs of the invention may become more “human-like,” while still retaining favorable properties such as a reduced immunogenicity, compared to the corresponding naturally occurring VHH domains. In various embodiments, the humanized VHHs of the invention can be obtained in any suitable manner known in the art and thus are not strictly limited to polypeptides that have been obtained using a polypeptide that comprises a naturally occurring V_{H}H domain as a starting material.

[0915] In an embodiment, the Fc-based chimeric protein complex comprises a VHH that has been “camelized,” i.e., by replacing one or more amino acid residues in the amino acid sequence of a naturally occurring VH domain from a conventional 4-chain antibody by one or more of the amino acid residues that occur at the corresponding position(s) in a V_{H}H domain of a heavy chain antibody of a camelid. In some embodiments, such “camelizing” substitutions are inserted at amino acid positions that form and/or are present at the VH-VL interface, and/or at the so-called Camelidae hallmark residues (see, for example, WO9404678, the entire contents of which are hereby incorporated by reference). In some embodiments, the VH sequence that is used as a starting material or starting point for generating or designing the camelized VHH is a VH sequence from a mammal, for example, the VH sequence of a human being, such as a VH3 sequence. In various embodiments, the camelized VHHs can be obtained in any suitable manner known in the art (i.e., as indicated under points (1)-(8) above) and thus are not strictly limited to polypeptides that have been obtained using a polypeptide that comprises a naturally occurring VH domain as a starting material.

[0916] In various embodiments, both “humanization” and “camelization” can be performed by providing a nucleotide sequence that encodes a naturally occurring V_{H}H domain or VH domain, respectively, and then changing, in a manner known in the art, one or more codons in the nucleotide sequence in such a way that the new nucleotide sequence encodes a “humanized” or “camelized” VHH, respectively. This nucleic acid can then be expressed in a manner known in the art, so as to provide the desired VHH of the invention. Alternatively, based on the amino acid sequence of a naturally occurring V_{H}H domain or VH domain, respectively, the amino acid sequence of the desired humanized or camelized VHH of the invention, respectively, can be designed and then synthesized de novo using techniques for peptide synthesis known in the art. Also, based on the amino acid sequence or nucleotide sequence of a naturally occurring V_{H}H domain or VH domain, respectively, a nucleotide sequence encoding the desired humanized or camelized VHH, respectively, can be designed and then synthesized de novo using techniques for nucleic acid synthesis known in the art, after which the nucleic acid thus obtained can be expressed in a manner known in the art, so as to provide the desired VHH of the invention. Other suitable methods and techniques for obtaining the VHHs of the invention and/or nucleic acids encoding the same, starting from naturally occurring VH sequences or V_{H}H sequences, are known in the art, and may, for example, comprise combining one or more parts of one or more naturally occurring VH sequences (such as one or more FR sequences and/or CDR sequences), one or more parts of one or more naturally occurring VHH sequences (such as one or more FR sequences or CDR sequences), and/or one or more synthetic or semi-synthetic sequences, in a suitable manner, so as to provide a VHH of the invention or a nucleotide sequence or nucleic acid encoding the same.

[0917] Methods for producing the Fc-based chimeric protein complex of the present technology are described herein. For example, DNA sequences encoding the Fc-based chimeric protein complex of the present technology can be chemically synthesized using methods known in the art. Synthetic DNA sequences can be ligated to other appropriate nucleotide sequences, including, e.g., expression control sequences, to produce gene expression constructs encoding the desired Fc-based chimeric protein complex of the present technology. Accordingly, in various embodiments, the present invention provides for isolated nucleic acids comprising a nucleotide sequence encoding the Fc-based chimeric protein complex of the present technology.

[0918] Nucleic acids encoding the Fc-based chimeric protein complex of the present technology can be incorporated (ligated) into expression vectors, which can be introduced into host cells through transfection, transformation, or transduction techniques. For example, nucleic acids encoding the Fc-based chimeric protein complex of the present technology invention can be introduced into host cells by retroviral transduction. Illustrative host cells are E. coli cells, Chinese hamster ovary (CHO) cells, human embryonic kidney 293 (HEK 293) cells, HeLa cells, baby hamster kidney (BHK) cells, monkey kidney cells (COS), human hepatocellular carcinoma cells (e.g., Hep G2), and myeloma cells. Transformed host cells can be grown under conditions that permit the host cells to express the genes that encode the Fc-based chimeric protein complex of the present technology. Accordingly, in various embodiments, the present invention provides expression vectors comprising nucleic acids that encode the Fc-based chimeric protein complex of the present technology. In various embodiments, the present invention additional provides host cells comprising such expression vectors.

[0919] Specific expression and purification conditions will vary depending upon the expression system employed. For example, if a gene is to be expressed in E. coli, it is first cloned into an expression vector by positioning the engineered gene downstream from a suitable bacterial promoter, e.g., Trp or Tac, and a prokaryotic signal sequence. In another example, if the engineered gene is to be expressed in eukaryotic host cells, e.g., CHO cells, it is first inserted into an expression vector containing for example, a suitable eukaryotic promoter, a secretion signal, enhancers, and various introns. The gene construct can be introduced into the host cells using transfection, transformation, or transduction techniques.

[0920] The Fc-based chimeric protein complex of the present technology can be produced by growing a host cell transfected with an expression vector encoding the Fc-based chimeric protein complex under conditions that permit expression of the protein. Following expression, the protein can be harvested and purified using techniques well known in the art, e.g., affinity tags such as glutathione-S-transferase (GST) and histidine (His) tags or by chromatography. In an embodiment, the Fc-based chimeric protein complex comprises a His tag. In an embodiment, the Fc-based chimeric protein complex comprises a His tag and a proteolytic site to allow cleavage of the His tag.

[0921] Accordingly, in various embodiments, the present invention provides for a nucleic acid encoding an Fc-based chimeric protein complex of the present invention. In various embodiments, the present invention provides for a host cell comprising a nucleic acid encoding an Fc-based chimeric protein complex of the present invention.

[0922] In various embodiments, the methods of modifying and producing the Fc-based chimeric protein complex as described herein can be easily adapted for the modification and production of any multi-specific Fc-based chimeric protein complex comprising two or more targeting moieties and/or signaling agents.

[0923] In various embodiments, the present Fc-based chimeric protein complex may be expressed in vivo, for instance, in a patient. For example, in various embodiments, the present Fc-based chimeric protein complex may be administered in the form of nucleic acid which encodes the present Fc-based chimeric protein complex. In various embodiments, the nucleic acid is DNA or RNA. In some embodiments, the present Fc-based chimeric protein complex is encoded by a modified mRNA, i.e. an mRNA comprising one or more modified nucleotides. In some embodiments, the modified mRNA comprises one or modifications found in U.S. Pat. No. 8,278,036, the entire contents of which are hereby incorporated by reference. In some embodiments, the modified mRNA comprises one or more of m5C, m5U, m6A, s2U, Ψ, and 2′-O-methyl-U. In some embodiments, the present invention relates to administering a modified mRNA encoding one or more of the present Fc-based chimeric protein complexes. In some embodiments, the present invention relates to gene therapy vectors comprising the same. In some embodiments, the present invention relates to gene therapy methods comprising the same. In various embodiments, the nucleic acid is in the form of an oncolytic virus, e.g. an adenovirus, reovirus, measles, herpes simplex, Newcastle disease virus or vaccinia.

### Pharmaceutically Acceptable Salts and Excipients

[0924] The Fc-based chimeric protein complex described herein can possess a sufficiently basic functional group, which can react with an inorganic or organic acid, or a carboxyl group, which can react with an inorganic or organic base, to form a pharmaceutically acceptable salt. A pharmaceutically acceptable acid addition salt is formed from a pharmaceutically acceptable acid, as is well known in the art. Such salts include the pharmaceutically acceptable salts listed in, for example, Journal of Pharmaceutical Science, 66, 2-19 (1977) and The Handbook of Pharmaceutical Salts; Properties, Selection, and Use. P. H. Stahl and C. G. Wermuth (eds.), Verlag, Zurich (Switzerland) 2002, which are hereby incorporated by reference in their entirety.

[0925] Pharmaceutically acceptable salts include, by way of non-limiting example, sulfate, citrate, acetate, oxalate, chloride, bromide, iodide, nitrate, bisulfate, phosphate, acid phosphate, isonicotinate, lactate, salicylate, acid citrate, tartrate, oleate, tannate, pantothenate, bitartrate, ascorbate, succinate, maleate, gentisinate, fumarate, gluconate, glucaronate, saccharate, formate, benzoate, glutamate, methanesulfonate, ethanesulfonate, benzenesulfonate, p-toluenesulfonate, cam phorsulfonate, pamoate, phenylacetate, trifluoroacetate, acrylate, chlorobenzoate, dinitrobenzoate, hydroxybenzoate, methoxybenzoate, methylbenzoate, o-acetoxybenzoate, naphthalene-2-benzoate, isobutyrate, phenylbutyrate, α-hydroxybutyrate, butyne-1,4-dicarboxylate, hexyne-1,4-dicarboxylate, caprate, caprylate, cinnamate, glycollate, heptanoate, hippurate, malate, hydroxymaleate, malonate, mandelate, mesylate, nicotinate, phthalate, teraphthalate, propiolate, propionate, phenylpropionate, sebacate, suberate, p-bromobenzenesulfonate, chlorobenzenesulfonate, ethylsulfonate, 2-hydroxyethylsulfonate, methylsulfonate, naphthalene-1-sulfonate, naphthalene-2-sulfonate, naphthalene-1,5-sulfonate, xylenesulfonate, and tartarate salts.

[0926] The term “pharmaceutically acceptable salt” also refers to a salt of the compositions of the present invention having an acidic functional group, such as a carboxylic acid functional group, and a base. Suitable bases include, but are not limited to, hydroxides of alkali metals such as sodium, potassium, and lithium; hydroxides of alkaline earth metal such as calcium and magnesium; hydroxides of other metals, such as aluminum and zinc; ammonia, and organic amines, such as unsubstituted or hydroxy-substituted mono-, di-, or tri-alkylamines, dicyclohexylamine; tributyl amine; pyridine; N-methyl, N-ethylamine; diethylamine; triethylamine; mono-, bis-, or tris-(2-OH-lower alkylamines), such as mono-; bis-, or tris-(2-hydroxyethyl)amine, 2-hydroxy-tert-butylamine, or tris-(hydroxymethyl)methylamine, N,N-di-lower alkyl-N-(hydroxyl-lower alkyl)-amines, such as N,N-dimethyl-N-(2-hydroxyethyl)amine or tri-(2-hydroxyethyl)amine; N-methyl-D-glucamine; and amino acids such as arginine, lysine, and the like.

[0927] In some embodiments, the compositions described herein are in the form of a pharmaceutically acceptable salt.

### Pharmaceutical Compositions and Formulations

[0928] In various embodiments, the present invention pertains to pharmaceutical compositions comprising the Fc-based chimeric protein complex described herein and a pharmaceutically acceptable carrier or excipient. In some embodiments, the present invention pertains to pharmaceutical compositions comprising the present Fc-based chimeric protein complex. In a further embodiment, the present invention pertains to pharmaceutical compositions comprising a combination of the present Fc-based chimeric protein complex and any other therapeutic agents described herein. Any pharmaceutical compositions described herein can be administered to a subject as a component of a composition that comprises a pharmaceutically acceptable carrier or vehicle. Such compositions can optionally comprise a suitable amount of a pharmaceutically acceptable excipient so as to provide the form for proper administration.

[0929] In various embodiments, pharmaceutical excipients can be liquids, such as water and oils, including those of petroleum, animal, vegetable, or synthetic origin, such as peanut oil, soybean oil, mineral oil, sesame oil and the like. The pharmaceutical excipients can be, for example, saline, gum acacia, gelatin, starch paste, talc, keratin, colloidal silica, urea and the like. In addition, auxiliary, stabilizing, thickening, lubricating, and coloring agents can be used. In one embodiment, the pharmaceutically acceptable excipients are sterile when administered to a subject. Water is a useful excipient when any agent described herein is administered intravenously. Saline solutions and aqueous dextrose and glycerol solutions can also be employed as liquid excipients, specifically for injectable solutions. Suitable pharmaceutical excipients also include starch, glucose, lactose, sucrose, gelatin, malt, rice, flour, chalk, silica gel, sodium stearate, glycerol monostearate, talc, sodium chloride, dried skim milk, glycerol, propylene, glycol, water, ethanol and the like. Any agent described herein, if desired, can also comprise minor amounts of wetting or emulsifying agents, or pH buffering agents. Other examples of suitable pharmaceutical excipients are described in Remington's Pharmaceutical Sciences 1447-1676 (Alfonso R. Gennaro eds., 19th ed. 1995), incorporated herein by reference.

[0930] The present invention includes the described pharmaceutical compositions (and/or additional therapeutic agents) in various formulations. Any inventive pharmaceutical composition (and/or additional therapeutic agents) described herein can take the form of solutions, suspensions, emulsion, drops, tablets, pills, pellets, capsules, capsules containing liquids, gelatin capsules, powders, sustained-release formulations, suppositories, emulsions, aerosols, sprays, suspensions, lyophilized powder, frozen suspension, desiccated powder, or any other form suitable for use. In one embodiment, the composition is in the form of a capsule. In another embodiment, the composition is in the form of a tablet. In yet another embodiment, the pharmaceutical composition is formulated in the form of a soft-gel capsule. In a further embodiment, the pharmaceutical composition is formulated in the form of a gelatin capsule. In yet another embodiment, the pharmaceutical composition is formulated as a liquid.

[0931] Where necessary, the inventive pharmaceutical compositions (and/or additional agents) can also include a solubilizing agent. Also, the agents can be delivered with a suitable vehicle or delivery device as known in the art. Combination therapies outlined herein can be co-delivered in a single delivery vehicle or delivery device.

[0932] The formulations comprising the inventive pharmaceutical compositions (and/or additional agents) of the present invention may conveniently be presented in unit dosage forms and may be prepared by any of the methods well known in the art of pharmacy. Such methods generally include the step of bringing the therapeutic agents into association with a carrier, which constitutes one or more accessory ingredients. Typically, the formulations are prepared by uniformly and intimately bringing the therapeutic agent into association with a liquid carrier, a finely divided solid carrier, or both, and then, if necessary, shaping the product into dosage forms of the desired formulation (e.g., wet or dry granulation, powder blends, etc., followed by tableting using conventional methods known in the art).

[0933] In various embodiments, any pharmaceutical compositions (and/or additional agents) described herein is formulated in accordance with routine procedures as a composition adapted for a mode of administration described herein.

[0934] Routes of administration include, for example: oral, intradermal, intramuscular, intraperitoneal, intravenous, subcutaneous, intranasal, epidural, sublingual, intranasal, intracerebral, intravaginal, transdermal, rectally, by inhalation, or topically. Administration can be local or systemic. In some embodiments, the administering is effected orally. In another embodiment, the administration is by parenteral injection. The mode of administration can be left to the discretion of the practitioner, and depends in-part upon the site of the medical condition. In most instances, administration results in the release of any agent described herein into the bloodstream.

[0935] In one embodiment, the Fc-based chimeric protein complex described herein is formulated in accordance with routine procedures as a composition adapted for oral administration. Compositions for oral delivery can be in the form of tablets, lozenges, aqueous or oily suspensions, granules, powders, emulsions, capsules, syrups, or elixirs, for example. Orally administered compositions can comprise one or more agents, for example, sweetening agents such as fructose, aspartame or saccharin; flavoring agents such as peppermint, oil of wintergreen, or cherry; coloring agents; and preserving agents, to provide a pharmaceutically palatable preparation. Moreover, where in tablet or pill form, the compositions can be coated to delay disintegration and absorption in the gastrointestinal tract thereby providing a sustained action over an extended period of time. Selectively permeable membranes surrounding an osmotically active driving any Fc-based chimeric protein complex described herein are also suitable for orally administered compositions. In these latter platforms, fluid from the environment surrounding the capsule is imbibed by the driving compound, which swells to displace the agent or agent composition through an aperture. These delivery platforms can provide an essentially zero order delivery profile as opposed to the spiked profiles of immediate release formulations. A time-delay material such as glycerol monostearate or glycerol stearate can also be useful. Oral compositions can include standard excipients such as mannitol, lactose, starch, magnesium stearate, sodium saccharin, cellulose, and magnesium carbonate. In one embodiment, the excipients are of pharmaceutical grade. Suspensions, in addition to the active compounds, may contain suspending agents such as, for example, ethoxylated isostearyl alcohols, polyoxyethylene sorbitol and sorbitan esters, microcrystalline cellulose, aluminum metahydroxide, bentonite, agar-agar, tragacanth, etc., and mixtures thereof.

[0936] Dosage forms suitable for parenteral administration (e.g. intravenous, intramuscular, intraperitoneal, subcutaneous and intra-articular injection and infusion) include, for example, solutions, suspensions, dispersions, emulsions, and the like. They may also be manufactured in the form of sterile solid compositions (e.g. lyophilized composition), which can be dissolved or suspended in sterile injectable medium immediately before use. They may contain, for example, suspending or dispersing agents known in the art. Formulation components suitable for parenteral administration include a sterile diluent such as water for injection, saline solution, fixed oils, polyethylene glycols, glycerine, propylene glycol or other synthetic solvents; antibacterial agents such as benzyl alcohol or methyl paraben; antioxidants such as ascorbic acid or sodium bisulfite; chelating agents such as EDTA; buffers such as acetates, citrates or phosphates; and agents for the adjustment of tonicity such as sodium chloride or dextrose.

[0937] For intravenous administration, suitable carriers include physiological saline, bacteriostatic water, Cremophor ELTM (BASF, Parsippany, N.J.) or phosphate buffered saline (PBS). The carrier should be stable under the conditions of manufacture and storage, and should be preserved against microorganisms. The carrier can be a solvent or dispersion medium containing, for example, water, ethanol, polyol (for example, glycerol, propylene glycol, and liquid polyetheylene glycol), and suitable mixtures thereof.

[0938] The compositions provided herein, alone or in combination with other suitable components, can be made into aerosol formulations (i.e., “nebulized”) to be administered via inhalation. Aerosol formulations can be placed into pressurized acceptable propellants, such as dichlorodifluoromethane, propane, nitrogen, and the like.

[0939] Any inventive pharmaceutical compositions (and/or additional agents) described herein can be administered by controlled-release or sustained-release means or by delivery devices that are well known to those of ordinary skill in the art. Examples include, but are not limited to, those described in U.S. Pat. Nos. 3,845,770; 3,916,899; 3,536,809; 3,598,123; 4,008,719; 5,674,533; 5,059,595; 5,591,767; 5,120,548; 5,073,543; 5,639,476; 5,354,556; and 5,733,556, each of which is incorporated herein by reference in its entirety. Such dosage forms can be useful for providing controlled- or sustained-release of one or more active ingredients using, for example, hydropropyl cellulose, hydropropylmethyl cellulose, polyvinylpyrrolidone, other polymer matrices, gels, permeable membranes, osmotic systems, multilayer coatings, microparticles, liposomes, microspheres, or a combination thereof to provide the desired release profile in varying proportions. Suitable controlled- or sustained-release formulations known to those skilled in the art, including those described herein, can be readily selected for use with the active ingredients of the agents described herein. The invention thus provides single unit dosage forms suitable for oral administration such as, but not limited to, tablets, capsules, gelcaps, and caplets that are adapted for controlled- or sustained-release.

[0940] Controlled- or sustained-release of an active ingredient can be stimulated by various conditions, including but not limited to, changes in pH, changes in temperature, stimulation by an appropriate wavelength of light, concentration or availability of enzymes, concentration or availability of water, or other physiological conditions or compounds.

[0941] In another embodiment, a controlled-release system can be placed in proximity of the target area to be treated, thus requiring only a fraction of the systemic dose (see, e.g., Goodson, in Medical Applications of Controlled Release, supra, vol. 2, pp. 115-138 (1984)). Other controlled-release systems discussed in the review by Langer, 1990, Science 249:1527-1533) may be used.

[0942] Pharmaceutical formulations preferably are sterile. Sterilization can be accomplished, for example, by filtration through sterile filtration membranes. Where the composition is lyophilized, filter sterilization can be conducted prior to or following lyophilization and reconstitution.

### Administration and Dosage

[0943] It will be appreciated that the actual dose of the Fc-based chimeric protein complex described herein to be administered according to the present invention will vary according to the particular dosage form, and the mode of administration. Many factors that may modify the action of the Fc-based chimeric protein complex (e.g., body weight, gender, diet, time of administration, route of administration, rate of excretion, condition of the subject, drug combinations, genetic disposition and reaction sensitivities) can be taken into account by those skilled in the art. Administration can be carried out continuously or in one or more discrete doses within the maximum tolerated dose. Optimal administration rates for a given set of conditions can be ascertained by those skilled in the art using conventional dosage administration tests.

[0944] In some embodiments, a suitable dosage of the Fc-based chimeric protein complex described herein is in a range of about 0.01 mg/kg to about 10 g/kg of body weight of the subject, about 0.01 mg/kg to about 1 g/kg of body weight of the subject, about 0.01 mg/kg to about 100 mg/kg of body weight of the subject, about 0.01 mg/kg to about 10 mg/kg of body weight of the subject, for example, about 0.01 mg/kg, about 0.02 mg/kg, about 0.03 mg/kg, about 0.04 mg/kg, about 0.05 mg/kg, about 0.06 mg/kg, about 0.07 mg/kg, about 0.08 mg/kg, about 0.09 mg/kg, about 0.1 mg/kg, about 0.2 mg/kg, about 0.3 mg/kg, about 0.4 mg/kg, about 0.5 mg/kg, about 0.6 mg/kg, about 0.7 mg/kg, about 0.8 mg/kg, about 0.9 mg/kg, about 1 mg/kg, about 1.1 mg/kg, about 1.2 mg/kg, about 1.3 mg/kg, about 1.4 mg/kg, about 1.5 mg/kg, about 1.6 mg/kg, about 1.7 mg/kg, about 1.8 mg/kg, 1.9 mg/kg, about 2 mg/kg, about 3 mg/kg, about 4 mg/kg, about 5 mg/kg, about 6 mg/kg, about 7 mg/kg, about 8 mg/kg, about 9 mg/kg, about 10 mg/kg body weight, about 100 mg/kg body weight, about 1 g/kg of body weight, about 10 g/kg of body weight, inclusive of all values and ranges there between.

[0945] Individual doses of the Fc-based chimeric protein complex described herein can be administered in unit dosage forms containing, for example, from about 0.01 mg to about 100 g, from about 0.01 mg to about 75 g, from about 0.01 mg to about 50 g, from about 0.01 mg to about 25 g, about 0.01 mg to about 10 g, about 0.01 mg to about 7.5 g, about 0.01 mg to about 5 g, about 0.01 mg to about 2.5 g, about 0.01 mg to about 1 g, about 0.01 mg to about 100 mg, from about 0.1 mg to about 100 mg, from about 0.1 mg to about 90 mg, from about 0.1 mg to about 80 mg, from about 0.1 mg to about 70 mg, from about 0.1 mg to about 60 mg, from about 0.1 mg to about 50 mg, from about 0.1 mg to about 40 mg active ingredient, from about 0.1 mg to about 30 mg, from about 0.1 mg to about 20 mg, from about 0.1 mg to about 10 mg, from about 0.1 mg to about 5 mg, from about 0.1 mg to about 3 mg, from about 0.1 mg to about 1 mg per unit dosage form, or from about 5 mg to about 80 mg per unit dosage form. For example, a unit dosage form can be about 0.01 mg, about 0.02 mg, about 0.03 mg, about 0.04 mg, about 0.05 mg, about 0.06 mg, about 0.07 mg, about 0.08 mg, about 0.09 mg, about 0.1 mg, about 0.2 mg, about 0.3 mg, about 0.4 mg, about 0.5 mg, about 0.6 mg, about 0.7 mg, about 0.8 mg, about 0.9 mg, about 1 mg, about 2 mg, about 3 mg, about 4 mg, about 5 mg, about 6 mg, about 7 mg, about 8 mg, about 9 mg about 10 mg, about 15 mg, about 20 mg, about 25 mg, about 30 mg, about 35 mg, about 40 mg, about 45 mg, about 50 mg, about 55 mg, about 60 mg, about 65 mg, about 70 mg, about 75 mg, about 80 mg, about 85 mg, about 90 mg, about 95 mg, about 100 mg, about 200 mg, about 500 mg, about 1 g, about 2.5 g, about 5 g, about 10 g, about 25 g, about 50 g, about 75 g, about 100 g, inclusive of all values and ranges there between.

[0946] In one embodiment, the Fc-based chimeric protein complex described herein are administered at an amount of from about 0.01 mg to about 100 g daily, from about 0.01 mg to about 75 g daily, from about 0.01 mg to about 50 g daily, from about 0.01 mg to about 25 g daily, from about 0.01 mg to about 10 g daily, from about 0.01 mg to about 7.5 g daily, from about 0.01 mg to about 5 g daily, from about 0.01 mg to about 2.5 g daily, from about 0.01 mg to about 1 g daily, from about 0.01 mg to about 100 mg daily, from about 0.1 mg to about 100 mg daily, from about 0.1 mg to about 95 mg daily, from about 0.1 mg to about 90 mg daily, from about 0.1 mg to about 85 mg daily, from about 0.1 mg to about 80 mg daily, from about 0.1 mg to about 75 mg daily, from about 0.1 mg to about 70 mg daily, from about 0.1 mg to about 65 mg daily, from about 0.1 mg to about 60 mg daily, from about 0.1 mg to about 55 mg daily, from about 0.1 mg to about 50 mg daily, from about 0.1 mg to about 45 mg daily, from about 0.1 mg to about 40 mg daily, from about 0.1 mg to about 35 mg daily, from about 0.1 mg to about 30 mg daily, from about 0.1 mg to about 25 mg daily, from about 0.1 mg to about 20 mg daily, from about 0.1 mg to about 15 mg daily, from about 0.1 mg to about 10 mg daily, from about 0.1 mg to about 5 mg daily, from about 0.1 mg to about 3 mg daily, from about 0.1 mg to about 1 mg daily, or from about 5 mg to about 80 mg daily. In various embodiments, the Fc-based chimeric protein complex is administered at a daily dose of about 0.01 mg, about 0.02 mg, about 0.03 mg, about 0.04 mg, about 0.05 mg, about 0.06 mg, about 0.07 mg, about 0.08 mg, about 0.09 mg, about 0.1 mg, about 0.2 mg, about 0.3 mg, about 0.4 mg, about 0.5 mg, about 0.6 mg, about 0.7 mg, about 0.8 mg, about 0.9 mg, about 1 mg, about 2 mg, about 3 mg, about 4 mg, about 5 mg, about 6 mg, about 7 mg, about 8 mg, about 9 mg about 10 mg, about 15 mg, about 20 mg, about 25 mg, about 30 mg, about 35 mg, about 40 mg, about 45 mg, about 50 mg, about 55 mg, about 60 mg, about 65 mg, about 70 mg, about 75 mg, about 80 mg, about 85 mg, about 90 mg, about 95 mg, about 100 mg, about 200 mg, about 500 mg, about 1 g, about 2.5 g, about 5 g, about 7.5 g, about 10 g, about 25 g, about 50 g, about 75 g, about 100 g, inclusive of all values and ranges there between.

[0947] In accordance with certain embodiments of the invention, the pharmaceutical composition comprising the Fc-based chimeric protein complex described herein may be administered, for example, more than once daily (e.g., about two times, about three times, about four times, about five times, about six times, about seven times, about eight times, about nine times, or about ten times daily), about once per day, about every other day, about every third day, about once a week, about once every two weeks, about once every month, about once every two months, about once every three months, about once every six months, or about once every year.

### Combination Therapy and Additional Therapeutic Agents

[0948] In various embodiments, the pharmaceutical composition of the present invention is co-administered in conjunction with additional therapeutic agent(s). Co-administration can be simultaneous or sequential.

[0949] In one embodiment, the additional therapeutic agent and the Fc-based chimeric protein complex are administered to a subject simultaneously. The term “simultaneously” as used herein, means that the additional therapeutic agent and the Fc-based chimeric protein complex are administered with a time separation of no more than about 60 minutes, such as no more than about 30 minutes, no more than about 20 minutes, no more than about 10 minutes, no more than about 5 minutes, or no more than about 1 minute. Administration of the additional therapeutic agent and the Fc-based chimeric protein complex be by simultaneous administration of a single formulation (e.g., a formulation comprising the additional therapeutic agent and the Fc-based chimeric protein complex) or of separate formulations (e.g., a first formulation including the additional therapeutic agent and a second formulation including the Fc-based chimeric protein complex).

[0950] Co-administration does not require the therapeutic agents to be administered simultaneously, if the timing of their administration is such that the pharmacological activities of the additional therapeutic agent and the Fc-based chimeric protein complex overlap in time, thereby exerting a combined therapeutic effect. For example, the additional therapeutic agent and the Fc-based chimeric protein complex can be administered sequentially. The term “sequentially” as used herein means that the additional therapeutic agent and the Fc-based chimeric protein complex are administered with a time separation of more than about 60 minutes. For example, the time between the sequential administration of the additional therapeutic agent and the Fc-based chimeric protein complex can be more than about 60 minutes, more than about 2 hours, more than about 5 hours, more than about 10 hours, more than about 1 day, more than about 2 days, more than about 3 days, more than about 1 week, or more than about 2 weeks, or more than about one month apart. The optimal administration times will depend on the rates of metabolism, excretion, and/or the pharmacodynamic activity of the additional therapeutic agent and the Fc-based chimeric protein complex being administered. Either the additional therapeutic agent or the Fc-based chimeric protein complex may be administered first.

[0951] Co-administration also does not require the therapeutic agents to be administered to the subject by the same route of administration. Rather, each therapeutic agent can be administered by any appropriate route, for example, parenterally or non-parenterally.

[0952] In some embodiments, the Fc-based chimeric protein complex described herein acts synergistically when co-administered with another therapeutic agent. In such embodiments, the Fc-based chimeric protein complex and the additional therapeutic agent may be administered at doses that are lower than the doses employed when the agents are used in the context of monotherapy.

[0953] In some embodiments, the present invention pertains to chemotherapeutic agents as additional therapeutic agents. For example, without limitation, such combination of the present Fc-based chimeric protein complex and chemotherapeutic agent find use in the treatment of cancers, as described elsewhere herein. Examples of chemotherapeutic agents include, but are not limited to, alkylating agents such as thiotepa and CYTOXAN cyclosphosphamide; alkyl sulfonates such as busulfan, improsulfan and piposulfan; aziridines such as benzodopa, carboquone, meturedopa, and uredopa; ethylenimines and methylamelamines including altretamine, triethylenemelamine, trietylenephosphoramide, triethiylenethiophosphoramide and trimethylolomelamine; acetogenins (e.g., bullatacin and bullatacinone); a camptothecin (including the synthetic analogue topotecan); bryostatin; cally statin; CC-1065 (including its adozelesin, carzelesin and bizelesin synthetic analogues); cryptophycins (e.g., cryptophycin 1 and cryptophycin 8); dolastatin; duocarmycin (including the synthetic analogues, KW-2189 and CB 1-TM1); eleutherobin; pancratistatin; a sarcodictyin; spongistatin; nitrogen mustards such as chlorambucil, chlornaphazine, cholophosphamide, estramustine, ifosfamide, mechlorethamine, mechlorethamine oxide hydrochloride, melphalan, novembichin, phenesterine, prednimustine, trofosfamide, uracil mustard; nitrosureas such as carmustine, chlorozotocin, fotemustine, lomustine, nimustine, and ranimnustine; antibiotics such as the enediyne antibiotics (e.g., calicheamicin, especially calicheamicin gammall and calicheamicin omegall (see, e.g., Agnew, Chem. Intl. Ed. Engl., 33: 183-186 (1994)); dynemicin, including dynemicin A; bisphosphonates, such as clodronate; an esperamicin; as well as neocarzinostatin chromophore and related chromoprotein enediyne antibiotic chromophores), aclacinomysins, actinomycin, authramycin, azaserine, bleomycins, cactinomycin, carabicin, caminomycin, carzinophilin, chromomycinis, dactinomycin, daunorubicin, detorubicin, 6-diazo-5-oxo-L-norleucine, ADRIAMYCIN doxorubicin (including morpholino-doxorubicin, cyanomorpholino-doxorubicin, 2-pyrrolino-doxorubicin and deoxy doxorubicin), epirubicin, esorubicin, idarubicin, marcellomycin, mitomycins such as mitomycin C, mycophenolic acid, nogalamycin, olivomycins, peplomycin, potfiromycin, puromycin, quelamycin, rodorubicin, streptonigrin, streptozocin, tubercidin, ubenimex, zinostatin, zorubicin; anti-metabolites such as methotrexate and 5-fluorouracil (5-FU); folic acid analogues such as denopterin, methotrexate, pteropterin, trimetrexate; purine analogs such as fludarabine, 6-mercaptopurine, thiamiprine, thioguanine; pyrimidine analogs such as ancitabine, azacitidine, 6-azauridine, carmofur, cytarabine, dideoxyuridine, doxifluridine, enocitabine, floxuridine; androgens such as calusterone, dromostanolone propionate, epitiostanol, mepitiostane, testolactone; anti-adrenals such as minoglutethimide, mitotane, trilostane; folic acid replenisher such as frolinic acid; aceglatone; aldophosphamide glycoside; aminolevulinic acid; eniluracil; amsacrine; bestrabucil; bisantrene; edatraxate; demecolcine; diaziquone; elformithine; elliptinium acetate; an epothilone; etoglucid; gallium nitrate; hydroxyurea; lentinan; lonidainine; maytansinoids such as maytansine and ansamitocins; mitoguazone; mitoxantrone; mopidanmol; nitraerine; pentostatin; phenamet; pirarubicin; losoxantrone; podophyllinic acid; 2-ethylhydrazide; procarbazine; PSK polysaccharide complex (JHS Natural Products, Eugene, Oreg.); razoxane; rhizoxin; sizofuran; spirogermanium; tenuazonic acid; triaziquone; 2,2′,2″-trichlorotriethylamine; trichothecenes (e.g., T-2 toxin, verracurin A, roridin A and anguidine); urethan; vindesine; dacarbazine; mannomustine; mitobronitol; mitolactol; pipobroman; gacytosine; arabinoside (“Ara-C”); cyclophosphamide; thiotepa; taxoids, e.g., TAXOL paclitaxel (Bristol-Myers Squibb Oncology, Princeton, N.J.), ABRAXANE Cremophor-free, albumin-engineered nanoparticle formulation of paclitaxel (American Pharmaceutical Partners, Schaumberg, 111.), and TAXOTERE doxetaxel (Rhone-Poulenc Rorer, Antony, France); chloranbucil; GEMZAR gemcitabine; 6-thioguanine; mercaptopurine; methotrexate; platinum analogs such as cisplatin, oxaliplatin and carboplatin; vinblastine; platinum; etoposide (VP-16); ifosfamide; mitoxantrone; vincristine; NAVELBINE. vinorelbine; novantrone; teniposide; edatrexate; daunomycin; aminopterin; xeloda; ibandronate; irinotecan (Camptosar, CPT-11) (including the treatment regimen of irinotecan with 5-FU and leucovorin); topoisomerase inhibitor RFS 2000; difluoromethylornithine (DMFO); retinoids such as retinoic acid; capecitabine; combretastatin; leucovorin (LV); oxaliplatin, including the oxaliplatin treatment regimen (FOLFOX); lapatinib (Tykerb); inhibitors of PKC-α, Raf, H-Ras, EGFR (e.g., erlotinib (Tarceva)) and VEGF-A that reduce cell proliferation and pharmaceutically acceptable salts, acids or derivatives of any of the above. In addition, the methods of treatment can further include the use of radiation. In addition, the methods of treatment can further include the use of photodynamic therapy.

[0954] Accordingly, in some embodiments, the present invention relates to combination therapies using the Fc-based chimeric protein complex and a chemotherapeutic agent. In some embodiments, the present invention relates to administration of the Fc-based chimeric protein complex to a patient undergoing treatment with a chemotherapeutic agent. In some embodiments, the chemotherapeutic agent is a DNA-intercalating agent such as, without limitation, doxorubicin, cisplatin, daunorubicin, and epirubicin. In an embodiment, the DNA-intercalating agent is doxorubicin.

[0955] In illustrative embodiments, the Fc-based chimeric protein complex acts synergistically when co-administered with doxorubicin. In an illustrative embodiment, the Fc-based chimeric protein complex acts synergistically when co-administered with doxorubicin for use in treating tumor or cancer. For example, co-administration of the Fc-based chimeric protein complex and doxorubicin may act synergistically to reduce or eliminate the tumor or cancer, or slow the growth and/or progression and/or metastasis of the tumor or cancer. In illustrative embodiments, the combination of the Fc-based chimeric protein complex and doxorubicin may exhibit improved safety profiles when compared to the agents used alone in the context of monotherapy. In illustrative embodiments, the Fc-based chimeric protein complex and doxorubicin may be administered at doses that are lower than the doses employed when the agents are used in the context of monotherapy. In some embodiments, the Fc-based chimeric protein complex comprises a mutated interferon such as a mutated IFNα2. In illustrative embodiments, the mutated IFNα2 comprises one or more mutations at positions 148, 149, and 153 with reference to SEQ ID NO: 1 or SEQ ID NO: 2, such as the substitutions M148A, R149A, and L153A.

[0956] In some embodiments, the present invention relates to combination therapy with one or more immune-modulating agents, for example, without limitation, agents that modulate immune checkpoint. In various embodiments, the immune-modulating agent targets one or more of PD-1, PD-L1, and PD-L2. In various embodiments, the immune-modulating agent is PD-1 inhibitor. In various embodiments, the immune-modulating agent is an antibody specific for one or more of PD-1, PD-L1, and PD-L2. For instance, in some embodiments, the immune-modulating agent is an antibody such as, by way of non-limitation, nivolumab, (ONO-4538/BMS-936558, MDX1106, OPDIVO, BRISTOL MYERS SQUIBB), pembrolizumab (KEYTRUDA, MERCK), pidilizumab (CT-011, CURE TECH), MK-3475 (MERCK), BMS 936559 (BRISTOL MYERS SQUIBB), MPDL3280A (ROCHE). In some embodiments, the immune-modulating agent targets one or more of CD137 or CD137L. In various embodiments, the immune-modulating agent is an antibody specific for one or more of CD137 or CD137L. For instance, in some embodiments, the immune-modulating agent is an antibody such as, by way of non-limitation, urelumab (also known as BMS-663513 and anti-4-1BB antibody). In some embodiments, the present Fc-based chimeric protein complex is combined with urelumab (optionally with one or more of nivolumab, lirilumab, and urelumab) for the treatment of solid tumors and/or B-cell non-Hodgkins lymphoma and/or head and neck cancer and/or multiple myeloma. In some embodiments, the immune-modulating agent is an agent that targets one or more of CTLA-4, AP2M1, CD80, CD86, SHP-2, and PPP2R5A. In various embodiments, the immune-modulating agent is an antibody specific for one or more of CTLA-4, AP2M1, CD80, CD86, SHP-2, and PPP2R5A. For instance, in some embodiments, the immune-modulating agent is an antibody such as, by way of non-limitation, ipilimumab (MDX-010, MDX-101, Yervoy, BMS) and/or tremelimumab (Pfizer). In some embodiments, the present Fc-based chimeric protein complexis combined with ipilimumab (optionally with bavituximab) for the treatment of one or more of melanoma, prostate cancer, and lung cancer. In various embodiments, the immune-modulating agent targets CD20. In various embodiments, the immune-modulating agent is an antibody specific CD20. For instance, in some embodiments, the immune-modulating agent is an antibody such as, by way of non-limitation, Ofatumumab (GENMAB), obinutuzumab (GAZYVA), AME-133v (APPLIED MOLECULAR EVOLUTION), Ocrelizumab (GENENTECH), TRU-015 (TRUBION/EMERGENT), veltuzumab (IMMU-106).

[0957] In some embodiments, the present invention relates to combination therapy using the Fc-based chimeric protein complex and a checkpoint inhibitor. In some embodiments, the present invention relates to administration of the Fc-based chimeric protein complex to a patient undergoing treatment with a checkpoint inhibitor. In some embodiments, the checkpoint inhibitor is an agent that targets one or more of PD-1, PD-L1, PD-L2, and CTLA-4 (including any of the anti-PD-1, anti-PD-L1, anti-PD-L2, and anti-CTLA-4 agents described herein). In some embodiment, the checkpoint inhibitor is one or more of nivolumab, (ONO-4538/BMS-936558, MDX1106, OPDIVO, BRISTOL MYERS SQUIBB), pembrolizumab (KEYTRUDA, MERCK), pidilizumab (CT-011, CURE TECH), MK-3475 (MERCK), BMS 936559 (BRISTOL MYERS SQUIBB), MPDL3280A (ROCHE), ipilimumab (MDX-010, MDX-101, Yervoy, BMS) and tremelimumab (Pfizer). In an embodiment, the checkpoint inhibitor is an antibody against PD-L1.

[0958] In illustrative embodiments, the Fc-based chimeric protein complex acts synergistically when co-administered with the anti-PD-L1 antibody. In an illustrative embodiment, the Fc-based chimeric protein complex acts synergistically when co-administered with the anti-PD-L1 antibody for use in treating tumor or cancer. For example, co-administration of the Fc-based chimeric protein complex and the anti-PD-L1 antibody may act synergistically to reduce or eliminate the tumor or cancer, or slow the growth and/or progression and/or metastasis of the tumor or cancer. In some embodiments, the combination of the Fc-based chimeric protein complex and the anti-PD-L1 antibody may exhibit improved safety profiles when compared to the agents used alone in the context of monotherapy. In some embodiments, the Fc-based chimeric protein complex and the anti-PD-L1 antibody may be administered at doses that are lower than the doses employed when the agents are used in the context of monotherapy. In some embodiments, the Fc-based chimeric protein complex comprises a mutated interferon such as a mutated IFNα2. In illustrative embodiments, the mutated IFNα2 comprises one or more mutations at positions 148, 149, and 153 with reference to SEQ ID NO: 1 or SEQ ID NO: 2, such as the substitutions M148A, R149A, and L153A.

[0959] In some embodiments, the present invention relates to combination therapies using the Fc-based chimeric protein complex and an immunosuppressive agent. In some embodiments, the present invention relates to administration of the Fc-based chimeric protein complex to a patient undergoing treatment with an immunosuppressive agent. In an embodiment, the immunosuppressive agent is TNF.

[0960] In illustrative embodiments, the Fc-based chimeric protein complex acts synergistically when co-administered with TNF. In an illustrative embodiment, the Fc-based chimeric protein complex acts synergistically when co-administered with TNF for use in treating tumor or cancer. For example, co-administration of the Fc-based chimeric protein complex and TNF may act synergistically to reduce or eliminate the tumor or cancer, or slow the growth and/or progression and/or metastasis of the tumor or cancer. In some embodiments, the combination of the Fc-based chimeric protein complex and TNF may exhibit improved safety profiles when compared to the agents used alone in the context of monotherapy. In some embodiments, the Fc-based chimeric protein complex and TNF may be administered at doses that are lower than the doses employed when the agents are used in the context of monotherapy. In some embodiments, the Fc-based chimeric protein complex comprises a mutated interferon such as a mutated IFNα2. In illustrative embodiments, the mutated IFNα2 comprises one or more mutations at positions 148, 149, and 153 with reference to SEQ ID NO: 1 or SEQ ID NO: 2, such as the substitutions M148A, R149A, and L153A.

[0961] In some embodiments, the Fc-based chimeric protein complex acts synergistically when used in combination with Chimeric Antigen Receptor (CAR) T-cell therapy. In an illustrative embodiment, the Fc-based chimeric protein complex acts synergistically when used in combination with CAR T-cell therapy in treating tumor or cancer. In an embodiment, the Fc-based chimeric protein complex acts synergistically when used in combination with CAR T-cell therapy in treating blood-based tumors. In an embodiment, the Fc-based chimeric protein complex acts synergistically when used in combination with CAR T-cell therapy in treating solid tumors. For example, use of the Fc-based chimeric protein complex and CAR T-cells may act synergistically to reduce or eliminate the tumor or cancer, or slow the growth and/or progression and/or metastasis of the tumor or cancer. In various embodiments, the Fc-based chimeric protein complex of the invention induces CAR T-cell division. In various embodiments, the Fc-based chimeric protein complex of the invention induces CAR T-cell proliferation. In various embodiments, the Fc-based chimeric protein complex of the invention prevents anergy of the CAR T cells.

[0962] In various embodiments, the CAR T-cell therapy comprises CAR T cells that target antigens (e.g., tumor antigens) such as, but not limited to, carbonic anhydrase IX (CAIX), 5T4, CD19, CD20, CD22, CD30, CD33, CD38, CD47, CS1, CD138, Lewis-Y, L1-CAM, MUC16, ROR-1, IL13Rα2, gp100, prostate stem cell antigen (PSCA), prostate-specific membrane antigen (PSMA), B-cell maturation antigen (BCMA), human papillomavirus type 16 E6 (HPV-16 E6), CD171, folate receptor alpha (FR-α), GD2, human epidermal growth factor receptor 2 (HER2), mesothelin, EGFRvIII, fibroblast activation protein (FAP), carcinoembryonic antigen (CEA), and vascular endothelial growth factor receptor 2 (VEGF-R2), as well as other tumor antigens well known in the art. Additional illustrative tumor antigens include, but are not limited to MART-1/Melan-A, gp100, Dipeptidyl peptidase IV (DPPIV), adenosine deaminase-binding protein (ADAbp), cyclophilin b, Colorectal associated antigen (CRC)-0017-1A/GA733, Carcinoembryonic Antigen (CEA) and its immunogenic epitopes CAP-1 and CAP-2, etv6, aml1, Prostate Specific Antigen (PSA) and its immunogenic epitopes PSA-1, PSA-2, and PSA-3, T-cell receptor/CD3-zeta chain, MAGE-family of tumor antigens (e.g., MAGE-A1, MAGE-A2, MAGE-A3, MAGE-A4, MAGE-A5, MAGE-A6, MAGE-A7, MAGE-A8, MAGE-A9, MAGE-A10, MAGE-A11, MAGE-A12, MAGE-Xp2 (MAGE-B2), MAGE-Xp3 (MAGE-B3), MAGE-Xp4 (MAGE-B4), MAGE-C1, MAGE-C2, MAGE-C3, MAGE-C4, MAGE-05), GAGE-family of tumor antigens (e.g., GAGE-1, GAGE-2, GAGE-3, GAGE-4, GAGE-5, GAGE-6, GAGE-7, GAGE-8, GAGE-9), BAGE, RAGE, LAGE-1, NAG, GnT-V, MUM-1, CDK4, tyrosinase, p53, MUC family, HER2/neu, p21ras, RCAS1, α-fetoprotein, E-cadherin, α-catenin, β-catenin and γ-catenin, p120ctn, gp100 Pmel117, PRAME, NY-ESO-1, cdc27, adenomatous polyposis coli protein (APC), fodrin, Connexin 37, Ig-idiotype, p15, gp75, GM2 and GD2 gangliosides, viral products such as human papilloma virus proteins, Smad family of tumor antigens, Imp-1, NA, EBV-encoded nuclear antigen (EBNA)-1, brain glycogen phosphorylase, SSX-1, SSX-2 (HOM-MEL-40), SSX-1, SSX-4, SSX-5, SCP-1 CT-7, c-erbB-2, CD19, CD37, CD56, CD70, CD74, CD138, AGS16, MUC1, GPNMB, Ep-CAM, PD-L1, and PD-L2.

[0963] Exemplary CAR T-cell therapy include, but are not limited to, JCAR014 (Juno Therapeutics), JCAR015 (Juno Therapeutics), JCAR017 (Juno Therapeutics), JCAR018 (Juno Therapeutics), JCAR020 (Juno Therapeutics), JCAR023 (Juno Therapeutics), JCAR024 (Juno Therapeutics), CTL019 (Novartis), KTE-C19 (Kite Pharma), BPX-401 (Bellicum Pharmaceuticals), BPX-501 (Bellicum Pharmaceuticals), BPX-601 (Bellicum Pharmaceuticals), bb2121 (Bluebird Bio), CD-19 Sleeping Beauty cells (Ziopharm Oncology), UCART19 (Cellectis), UCART123 (Cellectis), UCART38 (Cellectis), UCARTCS1 (Cellectis), OXB-302 (Oxford BioMedica, MB-101 (Mustang Bio) and CAR T-cells developed by Innovative Cellular Therapeutics.

[0964] In some embodiments, the Fc-based chimeric protein complex is used in a method of treating multiple sclerosis (MS) in combination with one or more MS therapeutics including, but not limited to, 3-interferons, glatiramer acetate, T-interferon, IFN-ß-2 (U.S. Patent Publication No. 2002/0025304), spirogermaniums (e.g., N-(3-dimethyl aminopropyl)-2-aza-8,8-dimethyl-8-germ anspiro [4:5] decane, N-(3-dimethylaminopropyl)-2-aza-8,8-diethyl-8-germaspiro [4:5] decane, N-(3-dimethylaminopropyl)-2-aza-8,8-dipropyl-8-germaspiro [4:5] decane, and N-(3-dimethylaminopropyl)-2-aza-8, 8-dibutyl-8-germaspiro [4:5] decane), vitamin D analogs (e.g., 1,25 (OH) 2D3, (see, e.g., U.S. Pat. No. 5,716,946)), prostaglandins (e.g., latanoprost, brimonidine, PGE1, PGE2 and PGE3, see, e.g., U.S. Patent Publication No. 2002/0004525), tetracycline and derivatives (e.g., minocycline and doxycycline, see, e.g., U.S. Patent Publication No. 20020022608), a VLA-4 binding antibody (see, e.g., U.S. Patent Publication No. 2009/0202527), adrenocorticotrophic hormone, corticosteroid, prednisone, methylprednisone, 2-chlorodeoxyadenosine, mitoxantrone, sulphasalazine, methotrexate, azathioprine, cyclophosphamide, cyclosporin, fumarate, anti-CD20 antibody (e.g., rituximab), and tizanidine hydrochloride.

[0965] In some embodiments, the Fc-based chimeric protein complex is used in combination with one or more therapeutic agents that treat one or more symptoms or side effects of MS. Such agents include, but are not limited to, amantadine, baclofen, papaverine, meclizine, hydroxyzine, sulfamethoxazole, ciprofloxacin, docusate, pemoline, dantrolene, desmopressin, dexamethasone, tolterodine, phenyloin, oxybutynin, bisacodyl, venlafaxine, amitriptyline, methenamine, clonazepam, isoniazid, vardenafil, nitrofurantoin, psyllium hydrophilic mucilloid, alprostadil, gabapentin, nortriptyline, paroxetine, propantheline bromide, modafinil, fluoxetine, phenazopyridine, methylprednisolone, carbamazepine, imipramine, diazepam, sildenafil, bupropion, and sertraline.

[0966] In some embodiments, the Fc-based chimeric protein complex is used in a method of treating multiple sclerosis in combination with one or more of the disease modifying therapies (DMTs) described herein (e.g. the agents of Table A). In some embodiments, the present invention provides an improved therapeutic effect as compared to use of one or more of the DMTs described herein (e.g. the agents listed in the Table below) without the one or more disclosed binding agent. In an embodiment, the combination of the Fc-based chimeric protein complex and the one or more DMTs produces synergistic therapeutic effects.

Illustrative Disease Modifying Therapies

| Generic Name | Branded Name/Company | Frequency/Route of Delivery/Usual Dose |
|---|---|---|
| teriflunomide | AUBAGIO (GENZYME) | Every day; pill taken orally; 7 mg or 14 mg. |
| interferon beta-la | AVONEX | Once a week; intramuscular |
| | (BIOGEN IDEC) | (into the muscle) injection; 30 mcg |
| interferon beta-1b | BETASERON (BAYER | Every other day; subcutaneous |
| | HEALTHCARE | (under the skin) injection; 250 mcg. |
| | PHARMACEUTICALS, | |
| | INC.) | |
| glatiramer acetate | COPAXONE (TEVA | Every day; subcutaneous (under the skin) |
| | NEUROSCIENCE) | injection; 20 mg (20,000 mcg) OR Three times a |
| | | week; subcutaneous (under the skin) |
| | | injection; 40 mg (40,000 mcg) |
| interferon beta-1b | EXTAVIA (NOVARTIS | Every other day; subcutaneous |
| | PHARMACEUTICALS | (under the skin) injection; 250 mcg. |
| | CORP.) | |
| fingolimod | GILENYA (NOVARTIS | Every day; capsule taken orally; 0.5 mg. |
| | PHARMACEUTICALS | |
| | CORP.) | |
| Alemtuzumab (anti-CD52 | LEMTRADA | Intravenous infusion on five consecutive days, |
| monoclonal antibody) | (GENZYME) | followed by intravenous infusion on three |
| | | consecutive days one year later (12 mg) |
| mitoxantrone | NOVANTRONE | Four times a year by IV infusion in a medical |
| | (EMD SERONO) | facility. Lifetime cumulative dose limit of |
| | | approximately 8-12 doses |
| | | over 2-3 years (140 mg/m2). |
| pegylated interferon beta-la | PLEGRIDY | Every 14 days; subcutaneous |
| | (BIOGEN IDEC) | (under the skin) injection; 125 mcg |
| interferon beta-la | REBIF | Three times a week; subcutaneous |
| | (EMD SERONO, INC.) | (under the skin) injection; 44 mcg |
| dimethyl fumarate (BG-12) | TECFIDERA | Twice a day; capsule taken orally; |
| | (BIOGEN IDEC) | 120 mg for one week and 240 mg therafter |
| Natalizumab (humanized | TYSABRI | Every four weeks by IV infusion in a registered |
| monoclonal antibody VLA-4 | (BIOGEN IDEC) | infusion facility; 300 mg |
| antagonist) | | |

DMTs in Development

| | | |
|---|---|---|
| Amiloride (targets Acid- | PAR | Oral |
| sensing ion channel-1 | PHARMACEUTICAL, | |
| Epithelial sodium channel | PERRIGO | |
| Na+/H+exchanger) | COMPANY, | |
| | SIGMAPHARM | |
| | LABORATORIES | |
| ATX-MS-1467 (targets Major | APITOPE/ | Intradermal Subcutaneous |
| histocompatibility complex | MERCK | |
| class II T cell responses to | SERONO | |
| myelin basic protein) | | |
| BAF312 (targets | NOVARTIS | Oral |
| Sphingosine 1-phosphate | PHARMA | |
| (S1P) receptor subtypes | | |
| S1P1 and S1P5 B cell | | |
| distrubution T cell | | |
| distribution) | | |
| BGC20-0134 (targets | BTG PLC | Oral |
| Proinflammatory and anti- | | |
| inflammatory cytokines) | | |
| BIIB033 (targets LINGO-1 | BIOGEN | Intravenous infusion used |
| (“leucine-rich repeat and | | in Phase I and Phase II |
| immunoglobulin-like domain- | | trials Subcutaneous |
| containing, Nogo receptor- | | injection used in Phase I trial |
| interacting protein”)) | | |
| Cladribine (targets CD4+ | MERCK SERONO | Oral |
| T cells DNA synthesis and | | |
| repair E-selectin Intracellular | | |
| adhesion molecule-1 Pro- | | |
| inflammatory cytokines | | |
| interleukin 2 and interleukin | | |
| 2R Pro-inflammatory | | |
| cytokines interleukin 8 and | | |
| RANTES Cytokine secretion | | |
| Monocyte and lymphocyte | | |
| migration) | | |
| Cyclophosphamide (targets | BAXTER | Oral, monthly intravenous pulses |
| T cells, particularly CD4+ | HEALTHCARE | |
| helper T cells B cells) | CORPORATION | |
| Daclizumab (humanized | BIOGEN IDEC/ | Projected to be IM injection once monthly |
| monoclonal antibody | ABBVIE | |
| targeting CD25 Immune | BIOTHERAPEUTICS | |
| modulator of T cells) | | |
| Dalfampridine (targets | ACORDA | One tablet every 12 hours |
| Voltage-gated potassium | THERAPEUTICS/ | (extended release), 10 mg twice a day |
| channels | BIOGEN IDEC | |
| Degenerin/epithelial sodium | | |
| channels L-type calcium | | |
| channels that contain | | |
| subunit Cavbeta3) | | |
| Dronabinol (targets | ABBVIE INC. | Oral |
| Cannabinoid receptor CB1 | | |
| Cannabinoid receptor CB2) | | |
| Firategrast (targets | GLAXOSMITHKLINE | Oral |
| Alpha4beta1 integrin) | | |
| GNbAC1MSRV-Env (targets | GENEURO SA/ | Intravenous infusion |
| envelope protein of the MS- | SERVIER | |
| associated retrovirus) | | |
| Idebenone (targets Reactive | SANTHERA | Oral Dose in clinical trial for PPMS is 2250 mg per |
| oxygen species) | PHARMACEUTICALS | day (750 mg dose, 3 times per day) |
| Imilecleucel-T (targets | OPEXA | Subcutaneous Given 5 times per year, according |
| Myelin-specific, autoreactive | THERAPEUTICS/ | to information from the manufacturer |
| T cells) | MERCK | |
| | SERONO | |
| Laquinimod | TEVA | Projected to be 0.6 mg or 1.2 mg |
| | | oral tablet taken daily |
| Masitinib (targets KIT (a | AB SCIENCE | Oral |
| stem cell factor, also called | | |
| c-KIT) receptor as well as | | |
| select other tyrosine kinases | | |
| Mast cells) | | |
| MEDI-551 (targets CD19, a | MEDIMMUNE | Intravenous Subcutaneous |
| B cell-specific antigen that is | | |
| part of the B cell receptor | | |
| complex and that functions | | |
| in determining the threshold | | |
| for B cell activation B cells | | |
| Plasmablasts, B cells that | | |
| express CD19 (but not | | |
| CD20) and that secrete large | | |
| quantities of antibodies; | | |
| depletion of plasmablasts | | |
| may be useful in | | |
| autoimmune diseases | | |
| involving pathogenic | | |
| autoantibodies) | | |
| Minocycline (targets T cells | VARIOUS | Oral Available as pellet-filled |
| Microglia Leukocyte | | capsules and an oral suspension |
| migration Matrix | | |
| metalloproteinases) | | |
| MIS416 (targets Innate | INNATE | Intravenous |
| immune system Pathogen- | IMMUNOTHERAPEUTICS | |
| associated molecular pattern | | |
| recognition receptors of the | | |
| innate immune system | | |
| Myeloid cells of the innate | | |
| immune system, which might | | |
| be able to remodel the | | |
| deregulated immune system | | |
| activity that occurs in SPMS) | | |
| Mycophenolate mofetil | MANUFACTURED BY | Oral |
| (targets Purine synthesis) | GENENTECH | |
| Naltrexone (targets Opioid | VARIOUS | Given at low doses (3 to 4.5 mg per day) in oral |
| receptors Toll-like receptor 4) | | form as “Low-dose naltrexone” (or “LDN”) |
| Ocrelizumab and | ROCHE/GSK | Projected to be IV infusion |
| Ofatumumab (humanized | | |
| monoclonal antibodies | | |
| targeting CD20 B cell | | |
| suppression | | |
| ONO-4641 (targets | ONO | Oral |
| Sphingosine 1-phosphate | PHARMACEUTICAL | |
| receptor) | CO. | |
| Phenytoin (targets Sodium | PFIZER | Intravenous Intramuscular |
| channels) | | (less favored option) Oral |
| Ponesimod | ACTELION | To be determined |
| Raltegravir (targets | MERCK | Oral 400 mg tablet twice daily, according to |
| Retroviral integrase | | information from the manufacturer |
| Herpesvirus DNA packaging | | |
| terminase) | | |
| RHB-104 | REDHILL | 95 mg clarithromycin, 45 mg |
| | BIOPHARMA | rifabutin, and 10 mg clofazimine |
| | LIMITED | |
| Riluzole (targets | COVIS | Oral |
| Glutamatergic | PHARMA/ | |
| neurotransmission | SANOFI | |
| Glutamate uptake and | | |
| release Voltage-gated | | |
| sodium channels Protein | | |
| kinase C) | | |

[0967] MS disease progression may be most intensive, and most damaging, at the earliest stages of disease progression. Accordingly, counter to many reimbursement policies and physician practice in light of, for example, costs and side effect mitigation, it may be most beneficial for a patient's long term disease status to begin treatment with the most intensive DMTs, for instance so-called second-line therapies. In some embodiments, a patient is treated with a regimen of the Fc-based chimeric protein complex in combination with a second-line therapy. Such a combination is used to reduce the side effect profile of one or more second-line therapies. In some embodiments, the combination is used to reduce dose of frequency of administration of one or more second-line therapies. For example, the doses of agents listed in the Table provided above may be reduced by about 50%, or about 40%, or about 30%, or about 25% in the context of the combination and the/or the frequency of dosing may be decreased to be half as often, or a third as often or may be reduced from, for example, daily to every other day or weekly, every other day to weekly or bi-weekly, weekly to bi-weekly or monthly, etc. Accordingly, in some embodiments, the Fc-based chimeric protein complex increase patient adherence by allowing for more convenient treatment regimens. Further, some DMTs have a suggested lifetime dose limitation e.g. for mitoxantrone, the lifetime cumulative dose should be strictly limited to 140 mg/m², or 2 to 3 years of therapy. In some embodiments, supplementation with the Fc-based chimeric protein complex preserves patient's access to mitoxantrone by allowing for lower or less frequent dosing with this DMT.

[0968] In some embodiments, the patient is a naive patient, who has not received treatment with one or more DMTs, and the Fc-based chimeric protein complex is used to buffer the side effects of a second-line therapy. Accordingly, the naive patient is able to benefit from the long-term benefits of a second-line therapy at disease outset. In some embodiments, the Fc-based chimeric protein complex is used as an entry therapy that precedes the use of a second-line therapy. For example, the Fc-based chimeric protein complex may be administered for an initial treatment period of about 3 months to stabilize disease and then the patient may be transitioned to a maintenance therapy of a second line agent.

[0969] It is generally believed that naive patients are more likely to respond to therapy as compared to patients that have received, and perhaps failed one or more DMT. In some embodiments, the Fc-based chimeric protein complex finds use in patients that have received, and perhaps failed one or more DMT. For example, in some embodiments, the Fc-based chimeric protein complex increases the therapeutic effect in patients that have received, and perhaps failed one or more DMT and may allow these patients to respond like naive patients.

[0970] In some embodiments, the patient has received or is receiving treatment with one or more DMTs and is not responding well. For example, the patient may be refractory or poorly responsive to one or more DMTs. In some embodiments, the patient is refractory, or poorly responsive to one or more of teriflunomide (AUBAGIO (GENZYME)); interferon beta-1a (AVONEX (BIOGEN IDEC); interferon beta-1b (BETASERON (BAYER HEALTHCARE PHARMACEUTICALS, INC.); glatiramer acetate (COPAXONE (TEVA NEUROSCIENCE); interferon beta-1b (EXTAVIA (NOVARTIS PHARMACEUTICALS CORP.); fingolimod (GILENYA (NOVARTIS PHARMACEUTICALS CORP.); alemtuzumab (LEMTRADA (GENZYME); mitoxantrone (NOVANTRONE (EMD SERONO); pegylated interferon beta-1a (PLEGRIDY (BIOGEN IDEC); interferon beta-1a (REBIF (EMD SERONO, INC.); dimethyl fumarate (BG-12) (TECFIDERA (BIOGEN IDEC); and natalizumab (TYSABRI (BIOGEN IDEC). In some embodiments, the one or more disclosed binding agent results in a therapeutic benefit of one or more DMTs in the patient and therefore reduces or eliminates the non-responsiveness to the DMT. For instance, this may spare the patient therapy with one or more DMTs at a higher dosing or frequency.

[0971] In patients with more aggressive disease, one approach is an induction treatment model, where a therapy with strong efficacy but strong safety concerns would be given first, followed by a maintenance therapy. An example of such a model might include initial treatment with alemtuzumab, followed by IFN-β, GA, or BG-12. In some embodiments, the one or more disclosed binding agent is used to prevent the need to switch therapies for maintenance. In some embodiments, the one or more disclosed binding agent is used to as maintenance therapy to one or more DMTs, including second line therapies. In some embodiments, the one or more disclosed binding agent is used to as first therapy in an induction, followed by another DMT as a maintenance therapy—such as, for example, a first line therapy.

[0972] In some embodiments, the one or more disclosed binding agent may be administered for an initial treatment period of about 3 months to stabilize disease and then the patient may be transitioned to a maintenance therapy of a first line agent.

[0973] In various embodiments, the one or more disclosed binding agent is used to reduce one or more side effects of a DMT, including without limitation any agent disclosed herein. For example, the one or more disclosed binding agent may be used in a regimen that allows dose sparing for one or more DMTs and therefore results in fewer side effects. For example, in some embodiments, the one or more disclosed binding agent may reduce one or more side effects of AUBAGIO or related agents, which may include hair thinning, diarrhea, flu, nausea, abnormal liver tests and unusual numbness or tingling in the hands or feet (paresthesias), levels of white blood cells, which can increase the risk of infections; increase in blood pressure; and severe liver damage. In some embodiments, the one or more disclosed binding agent may reduce one or more side effects of AVONEX or related agents which include flu-like symptoms following injection, depression, mild anemia, liver abnormalities, allergic reactions, and heart problems. In some embodiments, the one or more disclosed binding agent may reduce one or more side effects of BETASERON or related agents which include flu-like symptoms following injection, injection site reactions, allergic reactions, depression, liver abnormalities, and low white blood cell counts. In some embodiments, the one or more disclosed binding agent may reduce one or more side effects of COPAXONE or related agents which include injection site reactions, vasodilation (dilation of blood vessels); chest pain; a reaction immediately after injection, which includes anxiety, chest pain, palpitations, shortness of breath, and flushing. In some embodiments, the one or more disclosed binding agent may reduce one or more side effects of EXTAVIA or related agents which include flu-like symptoms following injection, injection site reactions, allergic reactions, depression, liver abnormalities, and low white blood cell counts. In some embodiments, the one or more disclosed binding agent may reduce one or more side effects of GILENYA or related agents which include headache, flu, diarrhea, back pain, liver enzyme elevations, cough, slowed heart rate following first dose, infections, and swelling in the eye. In some embodiments, the one or more disclosed binding agent may reduce one or more side effects of LEMTRADA or related agents which include rash, headache, fever, nasal congestion, nausea, urinary tract infection, fatigue, insomnia, upper respiratory tract infection, hives, itching, thyroid gland disorders, fungal Infection, pain in joints, extremities and back, diarrhea, vomiting, flushing, and infusion reactions (including nausea, hives, itching, insomnia, chills, flushing, fatigue, shortness of breath, changes in the sense of taste, indigestion, dizziness, pain). In some embodiments, the one or more disclosed binding agent may reduce one or more side effects of NOVANTRONE or related agents which include blue-green urine 24 hours after administration; infections, bone marrow suppression (fatigue, bruising, low blood cell counts), nausea, hair thinning, bladder infections, mouth sores, and serious liver and heart damage. In some embodiments, the one or more disclosed binding agent may reduce one or more side effects of PLEGRIDY or related agents which include flu-like symptoms following injection, injection site reactions, depression, mild anemia, liver abnormalities, allergic reactions, and heart problems. In some embodiments, the one or more disclosed binding agent may reduce one or more side effects of REBIF or related agents which include flu-like symptoms following injection, injection site reactions, liver abnormalities, depression, allergic reactions, and low red or white blood cell counts. In some embodiments, one or more disclosed binding agent may reduce one or more side effects of TECFIDERA or related agents which include flushing (sensation of heat or itching and a blush on the skin), gastrointestinal issues (nausea, diarrhea, abdominal pain), rash, protein in the urine, elevated liver enzymes; and reduction in blood lymphocyte (white blood cell) counts. In some embodiments, the one or more disclosed binding agent may reduce one or more side effects of TYSABRI or related agents which include headache, fatigue, urinary tract infections, depression, respiratory tract infections, joint pain, upset stomach, abdominal discomfort, diarrhea, vaginitis, pain in the arms or legs, rash, allergic or hypersensitivity reactions within two hours of infusion (dizziness, fever, rash, itching, nausea, flushing, low blood pressure, difficulty breathing, chest pain).

[0974] In some embodiments, the present invention relates to combination therapy with one or more chimeric agents described in WO 2013/10779, WO 2015/007536, WO 2015/007520, WO 2015/007542, and WO 2015/007903, the entire contents of which are hereby incorporated by reference in their entireties.

[0975] In some embodiments, inclusive of, without limitation, infectious disease applications, the present invention pertains to anti-infectives as additional therapeutic agents. In some embodiments, the anti-infective is an anti-viral agent including, but not limited to, Abacavir, Acyclovir, Adefovir, Amprenavir, Atazanavir, Cidofovir, Darunavir, Delavirdine, Didanosine, Docosanol, Efavirenz, Elvitegravir, Emtricitabine, Enfuvirtide, Etravirine, Famciclovir, and Foscarnet. In some embodiments, the anti-infective is an anti-bacterial agent including, but not limited to, cephalosporin antibiotics (cephalexin, cefuroxime, cefadroxil, cefazolin, cephalothin, cefaclor, cefamandole, cefoxitin, cefprozil, and ceftobiprole); fluoroquinolone antibiotics (cipro, Levaquin, floxin, tequin, avelox, and norflox); tetracycline antibiotics (tetracycline, minocycline, oxytetracycline, and doxycycline); penicillin antibiotics (amoxicillin, ampicillin, penicillin V, dicloxacillin, carbenicillin, vancomycin, and methicillin); monobactam antibiotics (aztreonam); and carbapenem antibiotics (ertapenem, doripenem, imipenem/cilastatin, and meropenem). In some embodiments, the anti-infectives include anti-malarial agents (e.g., chloroquine, quinine, mefloquine, primaquine, doxycycline, artemether/lumefantrine, atovaquone/proguanil and sulfadoxine/pyrimethamine), metronidazole, tinidazole, ivermectin, pyrantel pamoate, and albendazole.

[0976] In some embodiments, inclusive, without limitation, of autoimmmune applications, the additional therapeutic agent is an immunosuppressive agent. In some embodiments, the immunosuppressive agent is an anti-inflammatory agent such as a steroidal anti-inflammatory agent or a non-steroidal anti-inflammatory agent (NSAID). Steroids, particularly the adrenal corticosteroids and their synthetic analogues, are well known in the art. Examples of corticosteroids useful in the present invention include, without limitation, hydroxyltriamcinolone, alpha-methyl dexamethasone, beta-methyl betamethasone, beclomethasone dipropionate, betamethasone benzoate, betamethasone dipropionate, betamethasone valerate, clobetasol valerate, desonide, desoxymethasone, dexamethasone, diflorasone diacetate, diflucortolone valerate, fluadrenolone, fluclorolone acetonide, flumethasone pivalate, fluosinolone acetonide, fluocinonide, flucortine butylester, fluocortolone, fluprednidene (fluprednylidene) acetate, flurandrenolone, halcinonide, hydrocortisone acetate, hydrocortisone butyrate, methylprednisolone, triamcinolone acetonide, cortisone, cortodoxone, flucetonide, fludrocortisone, difluorosone diacetate, fluradrenolone acetonide, medrysone, amcinafel, amcinafide, betamethasone and the balance of its esters, chloroprednisone, clocortelone, clescinolone, dichlorisone, difluprednate, flucloronide, flunisolide, fluoromethalone, fluperolone, fluprednisolone, hydrocortisone, meprednisone, paramethasone, prednisolone, prednisone, beclomethasone dipropionate. (NSAIDS) that may be used in the present invention, include but are not limited to, salicylic acid, acetyl salicylic acid, methyl salicylate, glycol salicylate, salicylmides, benzyl-2,5-diacetoxybenzoic acid, ibuprofen, fulindac, naproxen, ketoprofen, etofenamate, phenylbutazone, and indomethacin. In some embodiments, the immunosupressive agent may be cytostatics such as alkylating agents, antimetabolites (e.g., azathioprine, methotrexate), cytotoxic antibiotics, antibodies (e.g., basiliximab, daclizumab, and muromonab), anti-immunophilins (e.g., cyclosporine, tacrolimus, sirolimus), inteferons, opioids, TNF binding proteins, mycophenolates, and small biological agents (e.g., fingolimod, myriocin). Additional anti-inflammatory agents are described, for example, in U.S. Pat. No. 4,537,776, the entire contents of which is incorporated by reference herein.

[0977] In some embodiments, the Fc-based chimeric protein complex described herein, include derivatives that are modified, i.e., by the covalent attachment of any type of molecule to the composition such that covalent attachment does not prevent the activity of the composition. For example, but not by way of limitation, derivatives include composition that have been modified by, inter a/ia, glycosylation, lipidation, acetylation, pegylation, phosphorylation, amidation, derivatization by known protecting/blocking groups, proteolytic cleavage, linkage to a cellular ligand or other protein, etc. Any of numerous chemical modifications can be carried out by known techniques, including, but not limited to specific chemical cleavage, acetylation, formylation, metabolic synthesis of tunicamycin, etc.

[0978] In still other embodiments, the Fc-based chimeric protein complex described herein further comprise a cytotoxic agent, comprising, in illustrative embodiments, a toxin, a chemotherapeutic agent, a radioisotope, and an agent that causes apoptosis, necrosis or any other form of cell death. Such agents may be conjugated to a composition described herein.

[0979] The Fc-based chimeric protein complex described herein may thus be modified post-translationally to add effector moieties such as chemical linkers, detectable moieties such as for example fluorescent dyes, enzymes, substrates, bioluminescent materials, radioactive materials, and chemiluminescent moieties, or functional moieties such as for example streptavidin, avidin, biotin, a cytotoxin, a cytotoxic agent, and radioactive materials.

[0980] Illustrative cytotoxic agents include, but are not limited to, methotrexate, aminopterin, 6-mercaptopurine, 6-thioguanine, cytarabine, 5-fluorouracil decarbazine; alkylating agents such as mechlorethamine, thioepa chlorambucil, melphalan, carmustine (BSNU), mitomycin C, lomustine (CCNU), 1-methylnitrosourea, cyclothosphamide, mechlorethamine, busulfan, dibromomannitol, streptozotocin, mitomycin C, cis-dichlorodiamine platinum (II) (DDP) cisplatin and carboplatin (paraplatin); anthracyclines include daunorubicin (formerly daunomycin), doxorubicin (adriamycin), detorubicin, carminomycin, idarubicin, epirubicin, mitoxantrone and bisantrene; antibiotics include dactinomycin (actinomycin D), bleomycin, calicheamicin, mithramycin, and anthramycin (AMC); and antimytotic agents such as the vinca alkaloids, vincristine and vinblastine. Other cytotoxic agents include paclitaxel (taxol), ricin, pseudomonas exotoxin, gemcitabine, cytochalasin B, gramicidin D, ethidium bromide, emetine, etoposide, tenoposide, colchicin, dihydroxy anthracin dione, 1-dehydrotestosterone, glucocorticoids, procaine, tetracaine, lidocaine, propranolol, puromycin, procarbazine, hydroxyurea, asparaginase, corticosteroids, mytotane (O,P′-(DDD)), interferons, and mixtures of these cytotoxic agents.

[0981] Further cytotoxic agents include, but are not limited to, chemotherapeutic agents such as carboplatin, cisplatin, paclitaxel, gemcitabine, calicheamicin, doxorubicin, 5-fluorouracil, mitomycin C, actinomycin D, cyclophosphamide, vincristine, bleomycin, VEGF antagonists, EGFR antagonists, platins, taxols, irinotecan, 5-fluorouracil, gemcytabine, leucovorine, steroids, cyclophosphamide, melphalan, vinca alkaloids (e.g., vinblastine, vincristine, vindesine and vinorelbine), mustines, tyrosine kinase inhibitors, radiotherapy, sex hormone antagonists, selective androgen receptor modulators, selective estrogen receptor modulators, PDGF antagonists, TNF antagonists, IL-1β antagonists, interleukins (e.g. IL-12 or IL-2), IL-12R antagonists, Toxin conjugated monoclonal antibodies, tumor antigen specific monoclonal antibodies, Erbitux, Avastin, Pertuzumab, anti-CD20 antibodies, Rituxan, ocrelizumab, ofatumumab, DXL625, HERCEPTIN®, or any combination thereof. Toxic enzymes from plants and bacteria such as ricin, diphtheria toxin and Pseudomonas toxin may be conjugated to the therapeutic agents (e.g. antibodies) to generate cell-type-specific-killing reagents (Youle, et al., Proc. Nat'l Acad. Sci. USA 77:5483 (1980); Gilliland, et al., Proc. Nat'l Acad. Sci. USA 77:4539 (1980); Krolick, et al., Proc. Nat'l Acad. Sci. USA 77:5419 (1980)).

[0982] Other cytotoxic agents include cytotoxic ribonucleases as described by Goldenberg in U.S. Pat. No. 6,653,104. Embodiments of the invention also relate to radioimmunoconjugates where a radionuclide that emits alpha or beta particles is stably coupled to the Fc-based chimeric protein complex, with or without the use of a complex-forming agent. Such radionuclides include beta-emitters such as Phosphorus-32, Scandium-47, Copper-67, Gallium-67, Yttrium-88, Yttrium-90, Iodine-125, Iodine-131, Samarium-153, Lutetium-177, Rhenium-186 or Rhenium-188, and alpha-emitters such as Astatine-211, Lead-212, Bismuth-212, Bismuth-213 or Actinium-225.

[0983] Illustrative detectable moieties further include, but are not limited to, horseradish peroxidase, acetylcholinesterase, alkaline phosphatase, beta-galactosidase and luciferase. Further illustrative fluorescent materials include, but are not limited to, rhodamine, fluorescein, fluorescein isothiocyanate, umbelliferone, dichlorotriazinylamine, phycoerythrin and dansyl chloride. Further illustrative chemiluminescent moieties include, but are not limited to, luminol. Further illustrative bioluminescent materials include, but are not limited to, luciferin and aequorin. Further illustrative radioactive materials include, but are not limited to, Iodine-125, Carbon-14, Sulfur-35, Tritium and Phosphorus-32.

### Methods of Treatment

[0984] Methods and compositions described herein have application to treating various diseases and disorders, including, but not limited to cancer, infections, immune disorders, and inflammatory diseases or conditions.

[0985] Further, any of the present agents may be for use in the treating, or the manufacture of a medicament for treating, various diseases and disorders, including, but not limited to cancer, infections, immune disorders, inflammatory diseases or conditions, and autoimmune diseases.

[0986] In some embodiments, the present invention relates to the treatment of, or a patient having cancer. As used herein, cancer refers to any uncontrolled growth of cells that may interfere with the normal functioning of the bodily organs and systems, and includes both primary and metastatic tumors. Primary tumors or cancers that migrate from their original location and seed vital organs can eventually lead to the death of the subject through the functional deterioration of the affected organs. A metastasis is a cancer cell or group of cancer cells, distinct from the primary tumor location, resulting from the dissemination of cancer cells from the primary tumor to other parts of the body. Metastases may eventually result in death of a subject. For example, cancers can include benign and malignant cancers, polyps, hyperplasia, as well as dormant tumors or micrometastases.

[0987] Illustrative cancers that may be treated include, but are not limited to, basal cell carcinoma, biliary tract cancer; bladder cancer; bone cancer; brain and central nervous system cancer; breast cancer; cancer of the peritoneum; cervical cancer; choriocarcinoma; colon and rectum cancer; connective tissue cancer; cancer of the digestive system; endometrial cancer; esophageal cancer; eye cancer; cancer of the head and neck; gastric cancer (including gastrointestinal cancer); glioblastoma; hepatic carcinoma; hepatoma; intra-epithelial neoplasm; kidney or renal cancer; larynx cancer; leukemia; liver cancer; lung cancer (e.g., small-cell lung cancer, non-small cell lung cancer, adenocarcinoma of the lung, and squamous carcinoma of the lung); melanoma; myeloma; neuroblastoma; oral cavity cancer (lip, tongue, mouth, and pharynx); ovarian cancer; pancreatic cancer; prostate cancer; retinoblastoma; rhabdomyosarcoma; rectal cancer; cancer of the respiratory system; salivary gland carcinoma; sarcoma; skin cancer; squamous cell cancer; stomach cancer; testicular cancer; thyroid cancer; uterine or endometrial cancer; cancer of the urinary system; vulval cancer; lymphoma including Hodgkin's and non-Hodgkin's lymphoma, as well as B-cell lymphoma (including low grade/follicular non-Hodgkin's lymphoma (NHL); small lymphocytic (SL) NHL; intermediate grade/follicular NHL; intermediate grade diffuse NHL; high grade immunoblastic NHL; high grade lymphoblastic NHL; high grade small non-cleaved cell NHL; bulky disease NHL; mantle cell lymphoma; AIDS-related lymphoma; and Waldenstrom's Macroglobulinemia; chronic lymphocytic leukemia (CLL); acute lymphoblastic leukemia (ALL); acute myeloid leukemia (AML); Hairy cell leukemia; chronic myeloblastic leukemia; as well as other carcinomas and sarcomas; and post-transplant lymphoproliferative disorder (PTLD), as well as abnormal vascular proliferation associated with phakomatoses, edema (e.g. that associated with brain tumors), and Meigs' syndrome.

[0988] In various embodiments, the present invention provides Fc-based chimeric protein complexes which comprise wild type or modified signaling agents for the treatment of cancer. In some embodiments, the Fc-based chimeric protein complexes of the invention significantly reduce and/or eliminate tumors. In some embodiments, the present Fc-based chimeric protein complexes significant reduce and/or eliminate tumors when administered to a subject in combination with other anti-cancer agents such as chemotherapeutic agents, checkpoint inhibitors, and immunosuppressive agents. In various embodiments, the combination of Fc-based chimeric protein complexes and other anti-cancer agents synergistically reduced tumor size and/or eliminated tumor cells.

[0989] In various embodiments, the present invention relates to cancer combination therapies with an Fc-based chimeric protein complex comprising one or more targeting moieties and one or more wild type or modified signaling agents. Accordingly, the present invention provides for an Fc-based chimeric protein complex that include, for example, a targeting moiety and one or more signaling agents and uses thereof in combination with anti-cancer agents.

[0990] For instance, in various embodiments, the present invention pertains to combination therapies for cancer involving Fc-based chimeric protein complex and a wild type or modified signaling agent, including, without limitation a mutated human interferon, such as IFN alpha, including human interferon alpha 2.

[0991] In other embodiments, the present Fc-based chimeric protein complex comprises multiple targeting moieties and therefore be present in bispecific or trispecific formats. For instance, in various embodiments, the present invention pertains to combination therapies for cancer involving an Fc-based chimeric protein complex and a checkpoint inhibitor binding agent (e.g. anti-PD-L1, anti-PD-1, anti-PD-L2, or anti-CTLA) described herein and a modified signaling agent, including, without limitation a mutated human interferon, such as IFN alpha, including human interferon alpha 2.

[0992] In various embodiments, the signaling agent is wild type or modified to have reduced affinity or activity for one or more of its receptors, which allows for attenuation of activity (inclusive of agonism or antagonism) and/or prevents non-specific signaling or undesirable sequestration of the chimeric protein. In some embodiments, the reduced affinity or activity at the receptor is restorable by inclusion in the present complex having one or more of the targeting moieties as described herein.

[0993] In some embodiments, the present invention relates to the treatment of, or a patient having a microbial infection and/or chronic infection. Illustrative infections include, but are not limited to, HIV/AIDS, tuberculosis, osteomyelitis, hepatitis B, hepatitis C, Epstein-Barr virus or parvovirus, T cell leukemia virus, bacterial overgrowth syndrome, fungal or parasitic infections.

[0994] In some embodiments, the present invention relates to the treatment of, or a patient having one or more of chronic granulomatous disease, osteopetrosis, idiopathic pulmonary fibrosis, Friedreich's ataxia, atopic dermatitis, Chagas disease, cancer, heart failure, autoimmune disease, sickle cell disease, thalassemia, blood loss, transfusion reaction, diabetes, vitamin B12 deficiency, collagen vascular disease, Shwachman syndrome, thrombocytopenic purpura, Celiac disease, endocrine deficiency state such as hypothyroidism or Addison's disease, autoimmune disease such as Crohn's Disease, systemic lupus erythematosis, rheumatoid arthritis or juvenile rheumatoid arthritis, ulcerative colitis immune disorders such as eosinophilic fasciitis, hypoimmunoglobulinemia, or thymoma/thymic carcinoma, graft versus host disease, preleukemia, Nonhematologic syndrome (e.g. Down's, Dubowwitz, Seckel), Felty syndrome, hemolytic uremic syndrome, myelodysplasic syndrome, nocturnal paroxysmal hemoglobinuria, osteomyelofibrosis, pancytopenia, pure red-cell aplasia, Schoenlein-Henoch purpura, malaria, protein starvation, menorrhagia, systemic sclerosis, liver cirrhosis, hypometabolic states, and congestive heart failure.

[0995] In some embodiments, the present invention relates to the treatment of, or a patient having one or more of chronic granulomatous disease, osteopetrosis, idiopathic pulmonary fibrosis, Friedreich's ataxia, atopic dermatitis, Chagas disease, mycobacterial infections, cancer, scleroderma, hepatitis, hepatitis C, septic shock, and rheumatoid arthritis.

[0996] In various embodiments, the present compositions are used to treat or prevent one or more inflammatory diseases or conditions, such as inflammation, acute inflammation, chronic inflammation, respiratory disease, atherosclerosis, restenosis, asthma, allergic rhinitis, atopic dermatitis, septic shock, rheumatoid arthritis, inflammatory bowel disease, inflammatory pelvic disease, pain, ocular inflammatory disease, celiac disease, Leigh Syndrome, Glycerol Kinase Deficiency, Familial eosinophilia (FE), autosomal recessive spastic ataxia, laryngeal inflammatory disease; Tuberculosis, Chronic cholecystitis, Bronchiectasis, Silicosis and other pneumoconioses.

[0997] In various embodiments, the present invention has application to treating autoimmune and/or neurodegenerative diseases.

[0998] In various embodiments, the present compositions are used to treat or prevent one or more conditions characterized by undesirable CTL activity, and/or a conditions characterized by high levels of cell death. For instance, in various embodiments, the present compositions are used to treat or prevent one or more conditions associated with uncontrolled or overactive immune response.

[0999] In various embodiments, the present compositions are used to treat or prevent one or more autoimmune and/or neurodegenerative diseases or conditions, such as MS, diabetes mellitus, lupus, celiac disease, Crohn's disease, ulcerative colitis, Guillain-Barre syndrome, scleroderms, Goodpasture's syndrome, Wegener's granulomatosis, autoimmune epilepsy, Rasmussen's encephalitis, Primary biliary sclerosis, Sclerosing cholangitis, Autoimmune hepatitis, Addison's disease, Hashimoto's thyroiditis, Fibromyalgia, Menier's syndrome; transplantation rejection (e.g., prevention of allograft rejection) pernicious anemia, rheumatoid arthritis, systemic lupus erythematosus, dermatomyositis, Sjogren's syndrome, lupus erythematosus, myasthenia gravis, Reiter's syndrome, Grave's disease, and other autoimmune diseases.

[1000] In various embodiments, the present invention is used to treat or prevent various autoimmune and/or neurodegenerative diseases. In some embodiments, the autoimmune and/or neurodegenerative diseases selected from MS (including without limitation the subtypes described herein), Alzheimer's disease (including, without limitation, Early-onset Alzheimer's, Late-onset Alzheimer's, and Familial Alzheimer's disease (FAD), Parkinson's disease and parkinsonism (including, without limitation, Idiopathic Parkinson's disease, Vascular parkinsonism, Drug-induced parkinsonism, Dementia with Lewy bodies, Inherited Parkinson's, Juvenile Parkinson's), Huntington's disease, Amyotrophic lateral sclerosis (ALS, including, without limitation, Sporadic ALS, Familial ALS, Western Pacific ALS, Juvenile ALS, Hiramaya Disease).

[1001] In an embodiment, the present invention provides methods for the treatment or prevention of one or more liver disorders, selected from viral hepatitis, alcohol hepatitis, autoimmune hepatitis, alcohol liver disease, fatty liver disease, steatosis, steatohepatitis, non-alcohol fatty liver disease, drug-induced liver disease, cirrhosis, fibrosis, liver failure, drug induced liver failure, metabolic syndrome, hepatocellular carcinoma, cholangiocarcinoma, primary biliary cirrhosis (primary biliary cholangitis), bile capillaries, Gilbert's syndrome, jaundice, and any other liver toxicity-associated indication. In some embodiments, the present invention provides methods for the treatment or prevention of liver fibrosis. In some embodiments, the present invention provides methods for the treatment or prevention of primary sclerosing cholangitis (PSC), chronic liver disease, nonalcoholic fatty liver disease (NAFLD), nonalcoholic steatohepatitis (NASH), hepatitis C infection, alcoholic liver disease, liver damage, optionally due to progressive fibrosis and liver fibrosis. In some embodiments, the present invention provides methods for the treatment or prevention of nonalcoholic steatohepatitis (NASH). In some embodiments, the present invention provides methods that reduce or prevent fibrosis. In some embodiments, the present invention provides methods that reduce or prevent cirrhosis. In some embodiments, the present invention provides methods that reduce or prevent hepatocellular carcinoma.

[1002] In various embodiments, the present invention provides methods for the treatment or prevention of cardiovascular disease, such as a disease or condition affecting the heart and vasculature, including but not limited to, coronary heart disease (CHD), cerebrovascular disease (CVD), aortic stenosis, peripheral vascular disease, atherosclerosis, arteriosclerosis, myocardial infarction (heart attack), cerebrovascular diseases (stroke), transient ischaemic attacks (TIA), angina (stable and unstable), atrial fibrillation, arrhythmia, valvular disease, and/or congestive heart failure. In various embodiments, the present invention provides methods for the treatment or prevention of cardiovascular disease which involves inflammation.

[1003] In various embodiments, the present invention provides methods for the treatment or prevention of one or more respiratory diseases, such as asthma, chronic obstructive pulmonary disease (COPD), bronchiectasis, allergic rhinitis, sinusitis, pulmonary vasoconstriction, inflammation, allergies, impeded respiration, respiratory distress syndrome, cystic fibrosis, pulmonary hypertension, pulmonary vasoconstriction, emphysema, Hantavirus pulmonary syndrome (HPS), Loeffler's syndrome, Goodpasture's syndrome, Pleurisy, pneumonitis, pulmonary edema, pulmonary fibrosis, Sarcoidosis, complications associated with respiratory syncitial virus infection, and other respiratory diseases.

[1004] In various embodiments, the present invention is used to treat or prevent MS. In various embodiments, the Fc-based chimeric protein complexes as described herein are used to eliminate and reduce multiple MS symptoms. Illustrative symptoms associated with multiple sclerosis, which can be prevented or treated with the compositions and methods described herein, include: optic neuritis, diplopia, nystagmus, ocular dysmetria, internuclear ophthalmoplegia, movement and sound phosphenes, afferent pupillary defect, paresis, monoparesis, paraparesis, hemiparesis, quadraparesis, plegia, paraplegia, hemiplegia, tetraplegia, quadraplegia, spasticity, dysarthria, muscle atrophy, spasms, cramps, hypotonia, clonus, myoclonus, myokymia, restless leg syndrome, footdrop, dysfunctional reflexes, paraesthesia, anaesthesia, neuralgia, neuropathic and neurogenic pain, l′hermitte's sign, proprioceptive dysfunction, trigeminal neuralgia, ataxia, intention tremor, dysmetria, vestibular ataxia, vertigo, speech ataxia, dystonia, dysdiadochokinesia, frequent micturation, bladder spasticity, flaccid bladder, detrusor-sphincter dyssynergia, erectile dysfunction, anorgasmy, frigidity, constipation, fecal urgency, fecal incontinence, depression, cognitive dysfunction, dementia, mood swings, emotional lability, euphoria, bipolar syndrome, anxiety, aphasia, dysphasia, fatigue, Uhthoff's symptom, gastroesophageal reflux, and sleeping disorders. Mitigation or amelioration or one more of these symptoms in a subject can be achieved by the one or more agent as described herein.

[1005] In various embodiments, the Fc-based chimeric protein complexes as described herein is used to treat or prevent clinically isolated syndrome (CIS). A clinically isolated syndrome (CIS) is a single monosymptomatic attack compatible with MS, such as optic neuritis, brain stem symptoms, and partial myelitis. Patients with CIS that experience a second clinical attack are generally considered to have clinically definite multiple sclerosis (CDMS). Over 80 percent of patients with CIS and MRI lesions go on to develop MS, while approximately 20 percent have a self-limited process. Patients who experience a single clinical attack consistent with MS may have at least one lesion consistent with multiple sclerosis prior to the development of clinically definite multiple sclerosis. In various embodiments, the presently described Fc-based chimeric protein complexes is used to treat CIS so it does not develop into MS, including, for example RRMS.

[1006] In various embodiments, the Fc-based chimeric protein complexes as described herein are used to treat or prevent radiologically isolated syndrome (RIS). In RIS, incidental imaging findings suggest inflammatory demyelination in the absence of clinical signs or symptoms. In various embodiments, the Fc-based chimeric protein complex is used to treat RIS so it does not develop into MS, including, for example RRMS.

[1007] In various embodiments, the Fc-based chimeric protein complexes as described herein are used to treat one or more of benign multiple sclerosis; relapsing-remitting multiple sclerosis (RRMS); secondary progressive multiple sclerosis (SPMS); progressive relapsing multiple sclerosis (PRMS); and primary progressive multiple sclerosis (PPMS).

[1008] Benign multiple sclerosis is a retrospective diagnosis which is characterized by 1-2 exacerbations with complete recovery, no lasting disability and no disease progression for 10-15 years after the initial onset. Benign multiple sclerosis may, however, progress into other forms of multiple sclerosis. In various embodiments, the Fc-based chimeric protein complex is used to treat benign multiple sclerosis so it does not develop into MS.

[1009] Patients suffering from RRMS experience sporadic exacerbations or relapses, as well as periods of remission. Lesions and evidence of axonal loss may or may not be visible on MRI for patients with RRMS. In various embodiments, the Fc-based chimeric protein complexes as described herein are used to treat RRMS. In some embodiments, RRMS includes patients with RRMS; patients with SPMS and superimposed relapses; and patients with CIS who show lesion dissemination on subsequent MRI scans according to McDonald's criteria. A clinical relapse, which may also be used herein as “relapse,” “confirmed relapse,” or “clinically defined relapse,” is the appearance of one or more new neurological abnormalities or the reappearance of one or more previously observed neurological abnormalities. This change in clinical state must last at least 48 hours and be immediately preceded by a relatively stable or improving neurological state of at least 30 days. In some embodiments, an event is counted as a relapse when the subject's symptoms are accompanied by observed objective neurological changes, consistent with an increase of at least 1.00 in the Expanded Disability Status Scale (EDSS) score or one grade in the score of two or more of the seven FS or two grades in the score of one of FS as compared to the previous evaluation.

[1010] SPMS may evolve from RRMS. Patients afflicted with SPMS have relapses, a diminishing degree of recovery during remissions, less frequent remissions and more pronounced neurological deficits than RRMS patients. Enlarged ventricles, which are markers for atrophy of the corpus callosum, midline center and spinal cord, are visible on MRI of patients with SPMS. In various embodiments, the Fc-based chimeric protein complexes as described herein is used to treat RRMS so it does not develop into SPMS.

[1011] PPMS is characterized by a steady progression of increasing neurological deficits without distinct attacks or remissions. Cerebral lesions, diffuse spinal cord damage and evidence of axonal loss are evident on the MRI of patients with PPMS. PPMS has periods of acute exacerbations while proceeding along a course of increasing neurological deficits without remissions. Lesions are evident on MRI of patients suffering from PRMS. In various embodiments, the Fc-based chimeric protein complex as described herein is used to treat RRMS and/or SPMS so it does not develop into PPMS.

[1012] In some embodiments, the Fc-based chimeric protein complexes as described herein are used in a method of treatment of relapsing forms of MS. In some embodiments, the Fc-based chimeric protein complex is used in a method of treatment of relapsing forms of MS to slow the accumulation of physical disability and/or reduce the frequency of clinical exacerbations, and, optionally, for patients who have experienced a first clinical episode and have MRI features consistent with MS. In some embodiments, the Fc-based chimeric protein complexes as described herein are used in a method of treatment of worsening relapsing-remitting MS, progressive-relapsing MS or secondary-progressive MS to reduce neurologic disability and/or the frequency of clinical exacerbations. In some embodiments, the Fc-based chimeric protein complexes reduce the frequency and/or severity of relapses.

[1013] In some embodiments, the Fc-based chimeric protein complexes are used in a method of treatment of relapsing forms of MS in patients who have had an inadequate response to (or are refractory to) one, or two, or three, or four, or five, or six, or seven, or eight, or nine, or ten or more disease modifying therapies (DMTs).

[1014] In various embodiments, the subject's symptoms may be assessed quantitatively, such as by EDSS, or decrease in the frequency of relapses, or increase in the time to sustained progression, or improvement in the magnetic resonance imaging (MRI) behavior in frequent, serial MRI studies and compare the patient's status measurement before and after treatment. In a successful treatment, the patient status will have improved (e.g., the EDSS measurement number or frequency of relapses will have decreased, or the time to sustained progression will have increased, or the MRI scans will show less pathology).

[1015] In some embodiments, the patient can be evaluated, e.g., before, during or after receiving the Fc-based chimeric protein complexes e.g., for indicia of responsiveness. Various clinical or other indicia of effectiveness of treatment, e.g., EDSS score; MRI scan; relapse number, rate, or severity; multiple sclerosis functional composite (MSFC); multiple sclerosis quality of life inventory (MSQLI); Paced Serial Addition Test (PASAT); symbol digit modalities test (SDMT); 25-foot walk test; 9-hole peg test; low contrast visual acuity; Modified Fatigue Impact Scale; expanded disability status score (EDSS); multiple sclerosis functional composite (MSFC); Beck Depression Inventory; and 7/24 Spatial Recall Test can be used. In various embodiments, the Fc-based chimeric protein complexes cause an improvement in one or more of these measures. Further, the patient can be monitored at various times during a regimen. In some embodiments, the Fc-based chimeric protein complexes cause a disease improvement as assessed by MacDonald dissemination in space and time. For example, for dissemination in space, lesion imaging, such as, by way of illustration, Barkhof-Tintore MR imaging criteria, may be used, including at least one gadolinium-enhancing lesion or 9 T2 hyperintense lesions; at least one infratentorial lesion; at least one juxtacortical lesion; at least about three periventricular lesions; and a spinal cord lesion. For dissemination in time, MRI can also be used; for example, if an MRI scan of the brain performed at months after an initial clinical event demonstrates a new gadolinium-enhancing lesion, this may indicate a new CNS inflammatory event, because the duration of gadolinium enhancement in MS is usually less than 6 weeks. If there are no gadolinium-enhancing lesions but a new T2 lesion (presuming an MRI at the time of the initial event), a repeat MR imaging scan after another 3 months may be needed with demonstration of a new T2 lesion or gadolinium-enhancing lesion.

[1016] In some embodiments, disease effects are assessed using any of the measures described in Lavery, et al. Multiple Sclerosis International, Vol 2014 (2014), Article ID 262350, the entire contents of which are hereby incorporated by reference.

[1017] In some embodiments, the Fc-based chimeric protein complex results in one or more of: (a) prevention of worsening in disability defined as deterioration by 1.0 point on EDSS, (b) increase in time to relapse, (c) reduction or stabilization of number and/or volume of gadolinium enhancing lesions, (d) decreased annualized relapse rate, (e) increased relapse duration and severity by NRS score, (f) decrease in disease activity as measured by MRI (annual rate of new or enlarging lesions), (g) lower average number of relapses at 1 year, or 2 years, (h) sustained disease progression as measured by the EDSS at 3 months, (i) prevention of conversion to CDMS, (j) no or few new or enhancing T2 lesions, (k) minimal change in hyperintense T2 lesion volume, (I) increased time to McDonald defined MS, (m) prevention of progression of disability as measured by sustained worsening of EDSS at 12 weeks, (n) reduction in time to relapse at 96 weeks, and (o) reduction or stabilization of brain atrophy (e.g. percentage change from baseline).

[1018] In one embodiment, the Fc-based chimeric protein complexes are administered and is effective to result in a decreased rate of relapse (e.g., at least 10%, 20%, 30%, 40%, 50%, 60%, 70%, 80% or greater reduction in rate of relapse) compared to the rate of relapse before administration (e.g., compared to the rate of relapse following administration for 12 months or for less than 12 months, e.g., about 10, or about 8, or about 4, or about 2 or less months) of treatment, or before commencement of treatment, when measured between 3-24 months (e.g., between 6-18 months, e.g., 12 months) after a previous relapse.

[1019] In one embodiment, the Fc-based chimeric protein complexes are administered and are effective to result in a prevention of an increase in EDSS score from a pre-treatment state. The Kurtzke Expanded Disability Status Scale (EDSS) is a method of quantifying disability in multiple sclerosis. The EDSS replaced the previous Disability Status Scales which used to bunch people with MS in the lower brackets. The EDSS quantifies disability in eight Functional Systems (FS) and allows neurologists to assign a Functional System Score (FSS) in each of these. The Functional Systems are: pyramidal, cerebellar, brainstem, sensory, bowel and bladder, visual and cerebral.

[1020] In one embodiment, the Fc-based chimeric protein complexes are administered and is effective to result in a decreased EDSS score (e.g., a decrease of 1, 1.5, 2, 2.5, 3 points or more, e.g., over at least three months, six months, one year, or longer) compared to the EDSS score following administration of the Fc-based chimeric protein complexes (e.g. for 12 months or for less than 12 months, e.g., less than 10, 8, 4 or less months, or before the commencement of treatment).

[1021] In one embodiment, the Fc-based chimeric protein complexes are administered and is effective to result in a decreased number of new lesions overall or of any one type (e.g., at least 10%, 20%, 30%, 40% decrease), compared to the number of new lesions following administration of the Fc-based chimeric protein complexes for 12 months or for less than 12 months, e.g., less than 10, 8, 4 or less months, or before commencement of treatment;

[1022] In one embodiment, the Fc-based chimeric protein complexes are administered and is effective to result in a decreased number of lesions overall or of any one type (e.g., at least 10%, 20%, 30%, 40% decrease), compared to the number of lesions following administration of the Fc-based chimeric protein complexes for 12 months or for less than 12 months, e.g., less than 10, 8, 4 or less months, or before commencement of treatment;

[1023] In one embodiment, the Fc-based chimeric protein complexes are administered and is effective to result in a reduced rate of appearance of new lesions overall or of any one type (e.g., at least 10%, 20%, 30%, 40% reduced rate), compared to the rate of appearance of new lesions following administration for 12 months or for less than 12 months, e.g., less than 10, 8, 4 or less months, or before commencement of treatment;

[1024] In one embodiment, the Fc-based chimeric protein complexes are administered and is effective to result in a reduced increase in lesion area overall or of any one type (e.g., at least 10%, 20%, 30%, 40% decreased increase), compared to an increase in lesion area following administration for 12 months or less than 12 months, e.g., less than 10, 8, 4 or less months, or before commencement of treatment.

[1025] In one embodiment, the Fc-based chimeric protein complexes are administered and is effective to result in a reduced incidence or symptom of optic neuritis (e.g., improved vision), compared to the incidence or symptom of optic neuritis following administration for 12 months or for less than 12 months, e.g., less than 10, 8, 4 or less months, or before commencement of treatment.

[1026] In various embodiments, methods of the invention are useful in treatment a human subject. In some embodiments, the human is a pediatric human. In other embodiments, the human is an adult human. In other embodiments, the human is a geriatric human. In other embodiments, the human may be referred to as a patient. In some embodiments, the human is a female. In some embodiments, the human is a male.

[1027] In certain embodiments, the human has an age in a range of from about 1 to about 18 months old, from about 18 to about 36 months old, from about 1 to about 5 years old, from about 5 to about 10 years old, from about 10 to about 15 years old, from about 15 to about 20 years old, from about 20 to about 25 years old, from about 25 to about 30 years old, from about 30 to about 35 years old, from about 35 to about 40 years old, from about 40 to about 45 years old, from about 45 to about 50 years old, from about 50 to about 55 years old, from about 55 to about 60 years old, from about 60 to about 65 years old, from about 65 to about 70 years old, from about 70 to about 75 years old, from about 75 to about 80 years old, from about 80 to about 85 years old, from about 85 to about 90 years old, from about 90 to about 95 years old or from about 95 to about 100 years old. In various embodiments, the human has an age of more than 30 years old.

### Immune Modulation

[1028] In various embodiments, the present compositions are capable of, or find use in methods of, immune modulation. For instance, in various embodiments, the present methods of treatment may involve the immune modulation described herein. In some embodiments, the immune modulation involves IFN signaling, including modified IFN signaling, in the context of a dendritic cell (DC).

[1029] In various embodiments, a multi-specific Fc-based chimeric protein complex is provided. In some embodiments, such multi-specific Fc-based chimeric protein complex of the invention recognizes and binds to a first target and one or more antigens found on one or more immune cells, which can include, without limitation, megakaryocytes, thrombocytes, erythrocytes, mast cells, basophils, neutrophils, eosinophils, monocytes, macrophages, natural killer cells, T lymphocytes (e.g., cytotoxic T lymphocytes, T helper cells, natural killer T cells), B lymphocytes, plasma cells, dendritic cells, or subsets thereof. In some embodiments, the Fc-based chimeric protein complex specifically binds to an antigen of interest and effectively directly or indirectly recruits one of more immune cells.

[1030] In some embodiments, the Fc-based chimeric protein complex specifically binds to an antigen of interest and effectively directly or indirectly recruits one of more immune cells to cause an immunosuppressive effect, e.g. the Fc-based chimeric protein complex directly or indirectly recruits an immunosuppressive immune cell. In some embodiments, the immunosuppressive immune cell is a regulatory T cell (or “Tregs” which, as used herein, refers to a subpopulation of T cells which modulate the immune system, abrogate autoimmune disease, maintain tolerance to self-antigens and thwart anti-tumor immune responses). Other immunosuppressive immune cells include myeloid suppressor cells (or “MSC,” which, as used herein, refers to a heterogeneous population of cells, defined by their myeloid origin, immature state, and ability to potently suppress T cell responses); tumor associated neutrophils (or “TANs” which, as used herein, refers to a subset of neutrophils that are capable of suppressing immune responses); tumor associated macrophages (or “TAMs” which, as used herein, refers to a subset of macrophages that may reduce an immune response), M2 macrophages, and/or tumor-inducing mast cells (which as used herein, refers to a subset of bone marrow-derived, long-lived, heterogeneous cellular population). Also, immunosuppressive immune cells include Th2 cells and Th17 cells. Additionally, immunosuppressive immune cells include immune cells, e.g., CD4+ and/or CD8+ T cells, expressing one or more checkpoint inhibitory receptors (e.g. receptors, including CTLA-4, B7-H3, B7-H4, TIM-3, expressed on immune cells that prevent or inhibit uncontrolled immune responses). See Stagg, J. et. al., Immunotherapeutic approach in triple-negative breast cancer. Ther Adv Med Oncol. (2013) 5(3):169-181).

[1031] In some embodiments, the Fc-based chimeric protein complex stimulates regulatory T cell (Treg) proliferation. Treg cells are characterized by the expression of the Foxp3 (Forkhead box p3) transcription factor. Most Treg cells are CD4+ and CD25+, and can be regarded as a subset of helper T cells, although a small population may be CD8+. Thus the immune response, which is to be modulated by a method of the invention, may comprise inducing proliferation of Treg cells, optionally in response to an antigen. Thus the method may comprise administering to the subject an Fc-based chimeric protein complex comprising the antigen. The antigen may be administered with an adjuvant which promotes proliferation of Treg cells.

[1032] Insofar as this method involves stimulating proliferation and differentiation of Treg cells in response to a specific antigen, it can be considered to be a method of stimulating an immune response. However, given that Treg cells may be capable of modulating the response of other cells of the immune system against an antigen in other ways, e.g. inhibiting or suppressing their activity, the effect on the immune system as a whole may be to modulate (e.g. suppress or inhibit) the response against that antigen. Thus the methods of this aspect of the invention can equally be referred to as methods of modulating (e.g. inhibiting or suppressing) an immune response against an antigen.

[1033] In some embodiments, the methods therapeutically or prophylactically inhibit or suppress an undesirable immune response against a particular antigen, even in a subject with pre-existing immunity or an on-going immune response to that antigen. This may be particularly useful, for example, in the treatment of autoimmune disease.

[1034] Under certain conditions, it may also be possible to tolerize a subject against a particular antigen by targeting the antigen to an antigen presenting cell expressing a target of the targeting moiety of the Fc-based chimeric protein complex. The invention thus provides a method for inducing tolerance in a subject towards an antigen, comprising administering to the subject a composition comprising the antigen, wherein the antigen is associated with a binding agent having affinity for the targeting moiety of the Fc-based chimeric protein complex and wherein the antigen is administered in the absence of an adjuvant. Tolerance in this context typically involves depletion of immune cells which would otherwise be capable of responding to that antigen, or inducing a lasting reduction in responsiveness to an antigen in such immune cells.

[1035] It may be particularly desirable to raise a Treg response against an antigen to which the subject exhibits, or is at risk of developing, an undesirable immune response. For example, it may be a self-antigen against which an immune response occurs in an autoimmune disease. Examples of autoimmune diseases in which specific antigens have been identified as potentially pathogenically significant include multiple sclerosis (myelin basic protein), insulin-dependent diabetes mellitus (glutamic acid decarboxylase), insulin-resistant diabetes mellitus (insulin receptor), celiac disease (gliadin), bullous pemphigoid (collagen type XVII), auto-immune haemolytic anaemia (Rh protein), auto-immune thrombocytopenia (GpIIb/IIIa), myaesthenia gravis (acetylcholine receptor), Graves' disease (thyroid-stimulating hormone receptor), glomerulonephritis, such as Goodpasture's disease (alpha3(IV)NC1 collagen), and pernicious anaemia (intrinsic factor). Alternatively, the target antigen may be an exogenous antigen which stimulates a response which also causes damage to host tissues. For example, acute rheumatic fever is caused by an antibody response to a Streptococcal antigen which cross-reacts with a cardiac muscle cell antigen. Thus these antigens, or particular fragments or epitopes thereof, may be suitable antigens for use in the present invention.

[1036] In various embodiments, the present agents, or methods using these agents, reduce or suppress autoreactive T cells. In some embodiments, the multi-specific Fc-based chimeric protein complex, optionally through an interferon signaling in the context of an Fc-based chimeric protein complex, causes this immunosuppression. In some embodiments, the multi-specific Fc-based chimeric protein complex stimulates PD-L1 or PD-L2 signaling and/or expression which may suppress autoreactive T cells. In some embodiments, the Fc-based chimeric protein complex, optionally through an interferon signaling in the context of an Fc-based chimeric protein complex, causes this immunosuppression. In some embodiments, the Fc-based chimeric protein complex stimulates PD-L1 or PD-L2 signaling and/or expression, which may suppress autoreactive T cells.

[1037] In various embodiments, the present methods comprise modulating the ratio of regulatory T cells to effector T cells in favor of immunosuppression, for instance, to treat autoimmune diseases. For instance, the present methods, in some embodiments, reduce and/or suppress one or more of cytotoxic T cells; effector memory T cells; central memory T cells; CD8⁺ stem cell memory effector cells; TH1 effector T-cells; TH2 effector T cells; TH9 effector T cells; TH17 effector T cells. For instance, the present methods, in some embodiments, increase and/or stimulate one or more of CD4⁺CD25⁺FOXP3⁺ regulatory T cells, CD4⁺CD25⁺ regulatory T cells, CD4⁺CD25⁻ regulatory T cells, CD4⁺CD25high regulatory T cells, TIM-3⁺PD-1⁺ regulatory T cells, lymphocyte activation gene-3 (LAG-3)⁺ regulatory T cells, CTLA-4/CD152⁺ regulatory T cells, neuropilin-1 (Nrp-1)⁺ regulatory T cells, CCR4⁺CCR8⁺ regulatory T cells, CD62L (L-selectin)⁺ regulatory T cells, CD45RBlow regulatory T cells, CD127low regulatory T cells, LRRC32/GARP⁺ regulatory T cells, CD39⁺ regulatory T cells, GITR⁺ regulatory T cells, LAP⁺ regulatory T cells, 1B11⁺ regulatory T cells, BTLA⁺ regulatory T cells, type 1 regulatory T cells (Tr1 cells), T helper type 3 (Th3) cells, regulatory cell of natural killer T cell phenotype (NKTregs), CD8⁺ regulatory T cells, CD8⁺CD28⁻ regulatory T cells and/or regulatory T-cells secreting IL-10, IL-35, TGF-β, TNF-α, Galectin-1, IFN-γ and/or MCP1.

[1038] In some embodiments, the present methods favor immune inhibitory signals over immune stimulatory signals. In some embodiments, the present methods allow for reversing or suppressing immune activating or co-stimulatory signals. In some embodiments, the present methods allow for providing immune inhibitory signals. For instance, in some embodiments, the present agents and methods reduce the effects of an immune stimulatory signal, which, without limitation, is one or more of 4-1BB, OX-40, HVEM, GITR, CD27, CD28, CD30, CD40, ICOS ligand; OX-40 ligand, LIGHT (CD258), GITR ligand, CD70, B7-1, B7-2, CD30 ligand, CD40 ligand, ICOS, ICOS ligand, CD137 ligand and TL1A. Further, in some embodiments, the present agents and methods increase the effects of an immune inhibitory signal, which, without limitation, is one or more of CTLA-4, PD-L1, PD-L2, PD-1, BTLA, HVEM, TIM3, GAL9, LAG3, VISTA, KIR, 2B4, CD160 (also referred to as BY55), CGEN-15049, CHK 1 and CHK2 kinases, A2aR, CEACAM (e.g., CEACAM-1, CEACAM-3 and/or CEACAM-5), and various B-7 family ligands (including, but are not limited to, B7-1, B7-2, B7-DC, B7-H1, B7-H2, B7-H3, B7-H4, B7-H5, B7-H6 and B7-H7.

### Kits

[1039] The present invention also provides kits for the administration of any Fc-based chimeric protein complex described herein (e.g. with or without additional therapeutic agents). The kit is an assemblage of materials or components, including at least one of the inventive pharmaceutical compositions described herein. Thus, in some embodiments, the kit contains at least one of the pharmaceutical compositions described herein.

[1040] The exact nature of the components configured in the kit depends on its intended purpose. In one embodiment, the kit is configured for the purpose of treating human subjects.

[1041] Instructions for use may be included in the kit. Instructions for use typically include a tangible expression describing the technique to be employed in using the components of the kit to effect a desired therapeutic outcome, such as to treat cancer. Optionally, the kit also contains other useful components, such as, diluents, buffers, pharmaceutically acceptable carriers, syringes, catheters, applicators, pipetting or measuring tools, bandaging materials or other useful paraphernalia as will be readily recognized by those of skill in the art.

[1042] The materials and components assembled in the kit can be provided to the practitioner stored in any convenience and suitable ways that preserve their operability and utility. For example, the components can be provided at room, refrigerated or frozen temperatures. The components are typically contained in suitable packaging materials. In various embodiments, the packaging material is constructed by well-known methods, preferably to provide a sterile, contaminant-free environment. The packaging material may have an external label which indicates the contents and/or purpose of the kit and/or its components.

### Definitions

[1043] As used herein, “a,” “an,” or “the” can mean one or more than one.

[1044] Further, the term “about” when used in connection with a referenced numeric indication means the referenced numeric indication plus or minus up to 10% of that referenced numeric indication. For example, the language “about 50” covers the range of 45 to 55.

[1045] As used herein, the term “effective amount” refers to a quantity sufficient to achieve a desired therapeutic and/or prophylactic effect, e.g., an amount which results in the prevention of, or a decrease in a disease or disorder or one or more signs or symptoms associated with a disease or disorder. In the context of therapeutic or prophylactic applications, the amount of a composition administered to the subject will depend on the degree, type, and severity of the disease and on the characteristics of the individual, such as general health, age, sex, body weight and tolerance to drugs. The skilled artisan will be able to determine appropriate dosages depending on these and other factors. The compositions can also be administered in combination with one or more additional therapeutic compounds. In the methods described herein, the therapeutic compounds may be administered to a subject having one or more signs or symptoms of a disease or disorder. As used herein, something is “decreased” if a read-out of activity and/or effect is reduced by a significant amount, such as by at least about 10%, at least about 20%, at least about 30%, at least about 40%, at least about 50%, at least about 60%, at least about 70%, at least about 80%, at least about 90%, at least about 95%, at least about 97%, at least about 98%, or more, up to and including at least about 100%, in the presence of an agent or stimulus relative to the absence of such modulation. As will be understood by one of ordinary skill in the art, in some embodiments, activity is decreased and some downstream read-outs will decrease but others can increase.

[1046] Conversely, activity is “increased” if a read-out of activity and/or effect is increased by a significant amount, for example by at least about 10%, at least about 20%, at least about 30%, at least about 40%, at least about 50%, at least about 60%, at least about 70%, at least about 80%, at least about 90%, at least about 95%, at least about 97%, at least about 98%, or more, up to and including at least about 100% or more, at least about 2-fold, at least about 3-fold, at least about 4-fold, at least about 5-fold, at least about 6-fold, at least about 7-fold, at least about 8-fold, at least about 9-fold, at least about 10-fold, at least about 50-fold, at least about 100-fold, in the presence of an agent or stimulus, relative to the absence of such agent or stimulus.

[1047] As referred to herein, all compositional percentages are by weight of the total composition, unless otherwise specified. As used herein, the word “include,” and its variants, is intended to be non-limiting, such that recitation of items in a list is not to the exclusion of other like items that may also be useful in the compositions and methods of this technology. Similarly, the terms “can” and “may” and their variants are intended to be non-limiting, such that recitation that an embodiment can or may comprise certain elements or features does not exclude other embodiments of the present technology that do not contain those elements or features.

[1048] Although the open-ended term “comprising,” as a synonym of terms such as including, containing, or having, is used herein to describe and claim the invention, the present invention, or embodiments thereof, may alternatively be described using alternative terms such as “consisting of” or “consisting essentially of.”

[1049] As used herein, the words “preferred” and “preferably” refer to embodiments of the technology that afford certain benefits, under certain circumstances. However, other embodiments may also be preferred, under the same or other circumstances. Furthermore, the recitation of one or more preferred embodiments does not imply that other embodiments are not useful, and is not intended to exclude other embodiments from the scope of the technology.

[1050] The amount of compositions described herein needed for achieving a therapeutic effect may be determined empirically in accordance with conventional procedures for the particular purpose. Generally, for administering therapeutic agents for therapeutic purposes, the therapeutic agents are given at a pharmacologically effective dose. A “pharmacologically effective amount,” “pharmacologically effective dose,” “therapeutically effective amount,” or “effective amount” refers to an amount sufficient to produce the desired physiological effect or amount capable of achieving the desired result, particularly for treating the disorder or disease. An effective amount as used herein would include an amount sufficient to, for example, delay the development of a symptom of the disorder or disease, alter the course of a symptom of the disorder or disease (e.g., slow the progression of a symptom of the disease), reduce or eliminate one or more symptoms or manifestations of the disorder or disease, and reverse a symptom of a disorder or disease. Therapeutic benefit also includes halting or slowing the progression of the underlying disease or disorder, regardless of whether improvement is realized.

[1051] Effective amounts, toxicity, and therapeutic efficacy can be determined by standard pharmaceutical procedures in cell cultures or experimental animals, e.g., for determining the LD50 (the dose lethal to about 50% of the population) and the ED50 (the dose therapeutically effective in about 50% of the population). The dosage can vary depending upon the dosage form employed and the route of administration utilized. The dose ratio between toxic and therapeutic effects is the therapeutic index and can be expressed as the ratio LD50/ED50. In some embodiments, compositions and methods that exhibit large therapeutic indices are preferred. A therapeutically effective dose can be estimated initially from in vitro assays, including, for example, cell culture assays. Also, a dose can be formulated in animal models to achieve a circulating plasma concentration range that includes the 1050 as determined in cell culture, or in an appropriate animal model. Levels of the described compositions in plasma can be measured, for example, by high performance liquid chromatography. The effects of any particular dosage can be monitored by a suitable bioassay. The dosage can be determined by a physician and adjusted, as necessary, to suit observed effects of the treatment.

[1052] In certain embodiments, the effect will result in a quantifiable change of at least about 10%, at least about 20%, at least about 30%, at least about 50%, at least about 70%, or at least about 90%. In some embodiments, the effect will result in a quantifiable change of about 10%, about 20%, about 30%, about 50%, about 70%, or even about 90% or more. Therapeutic benefit also includes halting or slowing the progression of the underlying disease or disorder, regardless of whether improvement is realized.

[1053] As used herein, “methods of treatment” are equally applicable to use of a composition for treating the diseases or disorders described herein and/or compositions for use and/or uses in the manufacture of a medicaments for treating the diseases or disorders described herein.

### EXAMPLES

[1054] In some Examples, two variants of the knob-in-hole technology are used: Ridgway (derived from Ridgway et al., Protein Engineering 1996; 9:617-621 and used e.g. in Examples 1-6) and Merchant (derived from Merchant et al., Nature Biotechnology 1998; 16:677-681 and used in most examples as of Example 7). Sequences are referred to as Fc1 and Fc2 (Ridgway hole and knob, respectively) and Fc3 and Fc4 (Merchant hole and knob, respectively). The ‘standard’ effector-mutation in the Ridgway constructs is LALA-PG (P329G), unless stated otherwise (see Example 4). For the Merchant constructs the LALA-KQ (K322Q) mutation is used (based on the data of Example 4) to this end.

Fc1: Ridgway hole: hIgG1 Fc_L234A_L235A_P329G_Y407T having the following amino acid sequence:
(SEQ ID NO: 1565)
DKTHTCPPCPAPEAAGGPSVFLFPPKPKDTLMISRTPEVTCVVVDVSHEDPEVKFNWYVDGVEVHNAK
TKPREEQYNSTYRVVSVLTVLHQDWLNGKEYKCKVSNKALPAPIEKTISKAKGQPREPQVYTLPPSRDE
LTKNQVSLTCLVKGFYPSDIAVEWESNGQPENNYKTTPPVLDSDGSFFLTSKLTVDKSRWQQGNVFSC
SVMHEALHNHYTQKSLSLSPGK
Fc2: Ridgway knob: hIgG1 Fc_L234A_L235A_P329G_T366Y having the following amino acid sequence:
(SEQ ID NO: 1566)
DKTHTCPPCPAPEAAGGPSVFLFPPKPKDTLMISRTPEVTCVVVDVSHEDPEVKFNWYVDGVEVHNAK
TKPREEQYNSTYRVVSVLTVLHQDWLNGKEYKCKVSNKALPAPIEKTISKAKGQPREPQVYTLPPSRDE
LTKNQVSLYCLVKGFYPSDIAVEWESNGQPENNYKTTPPVLDSDGSFFLYSKLTVDKSRWQQGNVFSC
SVMHEALHNHYTQKSLSLSPGK
Fc3: Merchant hole: hIgG1 Fc_L234A_L235A_K322Q_Y3490_T3665_L368A_Y407V having the following
amino acid sequence:
(SEQ ID NO: 1567)
DKTHTCPPCPAPEAAGGPSVFLFPPKPKDTLMISRTPEVTCVVVDVSHEDPEVKFNWYVDGVEVHNAK
TKPREEQYNSTYRVVSVLTVLHQDWLNGKEYKCKVSNKALPAPIEKTISKAKGQPREPQVCTLPPSRDE
LTKNQVSLSCAVKGFYPSDIAVEWESNGQPENNYKTTPPVLDSDGSFFLVSKLTVDKSRWQQGNVFS
CSVMHEALHNHYTQKSLSLSPGK
Fc4: Merchant knob: hIgG1 Fc_L234A_L235A_K322Q_53540_T366W having the following amino acid
sequence:
(SEQ ID NO: 1568)
DKTHTCPPCPAPEAAGGPSVFLFPPKPKDTLMISRTPEVTC\NVDVSHEDPEVKFNWYVDGVEVHNAK
TKPREEQYNSTYRVVSVLTVLHQDWLNGKEYKCKVSNKALPAPIEKTISKAKGQPREPQVYTLPPCRDE
LTKNQVSLWCLVKGFYPSDIAVEWESNGQPENNYKTTPPVLDSDGSFFLYSKLTVDKSRWQQGNVFS
CSVMHEALHNHYTQKSLSLSPGK

[1055] Throughout the Examples, two Clec9A VHHs are used: R1CHCL50 (SEQ ID NO: 289) and 3LEC89 (SEQ ID NO: 391). Both are used in the original sequence or in a mutated form as follows:

R1CHCL50_opt4: R1CHCL50_E1D-A74S-K83R-Q108L-H13Q-T64K (where E1D, A74S, K83R, Q108L,
H13Q, and T64K refer to mutations in R1CHCL50 VHH having the amino acid sequence of SEQ ID NO:
289). R1CHCL50_opt4 has the following amino acid sequence:
(SEQ ID NO: 1569)
DVQLVESGGGLVQPGGSLRLSCAASGSFSSINVMGWYRQAPGKERELVARITNLGLPNYADSVKGRF
TISRDNSKNTVYLQMNSLRPEDTAVYYCYLVALKAEYWGQGTLVTVSS
3LEC89_opt4: 3LE089_E1D-Q5V-A745-Q108L-G75K (where E1D, Q5V, A745, Q108L, and G75K refer
to mutations in 3LEC89 VHH having the amino acid sequence of SEQ ID NO: 391).
3LEC89_opt4 has the following amino acid sequence:
(SEQ ID NO: 1570)
DVQLVESGGGLVQPGGSLRLSCAASGRIFSVNAMGWYRQAPGKQRELVAAITNQGAPTYADSVKGRF
TISRDNSKNTVYLQMNSLRPEDTAVYYCKAFTRGDDYWGQGTLVTVSS

### Example 1: Fc-Based Chimeric Protein Complex Construction

[1056] Chimeric proteins with a targeting moiety and signaling agent were cloned into a human IgG1 Fc-fusion format mutated for reduced FcγR and C1q binding (LALA-PG mutations). A total of 5 combinations (see FIGS. 20A-E): two homodimeric and three heterodimeric (based on the knob-in-hole mutations; see Ridgway et al., Protein Engineering, Design and Selection, Volume 9, Issue 7, 1 Jul. 1996, Pages 617-621,) were constructed. In these fusion proteins the anti-human Clec9A VHH 3LEC89 was the targeting moiety and human IFNα2 with a R149A mutation was the signaling agent; these reagents were used for illustration of the general concept.

[1057] The relevant sequences (see FIGS. 20A-E for the identifiers) were:

P-956: pcDNA3.4-mouse light chain kappa-hIgG1-LALA-PG-20*GGS-3LEC89-20*GGS+G-IFNa2 R149A
(SEQ ID NO: 1435)
MKLPVRLLVLMFWIPASSSDKTHTCPPCPAPEAAGGPSVFLFPPKPKDTLMISRTPEVTCVVVDVSHEDPEVKF
NWYVDGVEVHNAKTKPREEQYNSTYRVVSVLTVLHQDWLNGKEYKCKVSNKALGAPIEKTISKAKGQPREPQ
VYTLPPSRDELTKNQVSLTCLVKGFYPSDIAVEWESNGQPENNYKTTPPVLDSDGSFFLYSKLTVDKSRWQQG
NVFSCSVMHEALHNHYTQKSLSLSPGKGGSGGSGGSGGSGGSGGSGGSGGSGGSGGSGGSGGSGGSGGS
GGSGGSGGSGGSGGSGGSQVQLQESGGGLVQPGGSLRLSCAASGRIFSVNAMGWYRQAPGKQRELVAAITN
QGAPTYADSVKGRFTISRDNAGNTVYLQMNSLRPEDTAVYYCKAFTRGDDYWGQGTQVTVSSGGSGGSGGSG
GSGGSGGSGGSGGSGGSGGSGGSGGSGGSGGSGGSGGSGGSGGSGGSGGSGCDLPQTHSLGSRRTLMLL
AQMRKISLFSCLKDRHDFGFPQEEFGNQFQKAETIPVLHEMIQQIFNLFSTKDSSAAWDETLLDKFYTELYQQLN
DLEACVIGVGVTETPLMKEDSILAVRKYFRITLYLKEKKYSPCAWEVVRAEIMASFSLSTNLESLRSKE
P-957: pcDNA3.4-mouse Ig heavy chain-3LEC89-20*GGS-hIgG1-LALA-PG-20*GGS+G-IFNa2 R149A
(SEQ ID NO: 1436)
MGWSCIIFFLVATATGVHSQVQLQESGGGLVQPGGSLRLSCAASGRIFSVNAMGWYRQAPGKQRELVAAITNQ
GAPTYADSVKGRFTISRDNAGNTVYLQMNSLRPEDTAVYYCKAFTRGDDYWGQGTQVTVSSGGSGGSGGSGG
SGGSGGSGGSGGSGGSGGSGGSGGSGGSGGSGGSGGSGGSGGSGGSGGSDKTHTCPPCPAPEAAGGPS
VFLFPPKPKDILMISRTPEVTCVVVDVSHEDPEVKFNWYVDGVEVHNAKTKPREEQYNSTYRVVSVLTVLHQD
WLNGKEYKCKVSNKALGAPIEKTISKAKGQPREPQVYTLPPSRDELTKNQVSLICLVKGFYPSDIAVEWESNG
QPENNYKTTPPVLDSDGSFFLYSKLTVDKSRWQQGNVFSCSVMHEALHNHYTQKSLSLSPGKGGSGGSGGS
GGSGGSGGSGGSGGSGGSGGSGGSGGSGGSGGSGGSGGSGGSGGSGGSGGSGCDLPQTHSLGSRRTLML
LAQMRKISLFSCLKDRHDFGFPQEEFGNQFQKAETIPVLHEMIQQIFNLFSTKDSSAAWDETLLDKFYTELYQQLN
DLEACVIQGVGVTETPLMKEDSILAVRKYFQRITLYLKEKKYSPCAWEVVRAEIMASFSLSTNLQESLRSKE
P-958: pcDNA3.4-mouse Ig heavy chain-3LEC89-20*GGS-hIgG1-LALA-PG-YT (hole)
(SEQ ID NO: 1437)
MGWSCIIFFLVATATGVHSQVQLQESGGGLVQPGGSLRLSCAASGRIFSVNAMGWYRQAPGKQRELVAAITNQ
GAPTYADSVKGRFTISRDNAGNTVYLQMNSLRPEDTAVYYCKAFTRGDDYWGQGTQVTVSSGGSGGSGGSGG
SGGSGGSGGSGGSGGSGGSGGSGGSGGSGGSGGSGGSGGSGGSGGSGGSDKTHTCPPCPAPEAAGGPS
VFLFPPKPKDILMISRTPEVTCVVVDVSHEDPEVKFNWYVDGVEVHNAKTKPREEQYNSTYRVVSVLTVLHQD
WLNGKEYKCKVSNKALGAPIEKTISKAKGQPREPQVYTLPPSRDELTKNQVSLICLVKGFYPSDIAVEWESNG
QPENNYKTTPPVLDSDGSFFLTSKLTVDKSRWQQGNVFSCSVMHEALHNHYTQKSLSLSPGK
P-959: pcDNA3.4-mouse light chain kappa-hIgGl-LALA-PG-TY (knob)-20*GGS+G-IFNa2_R149A
(SEQ ID NO: 1438)
MKLPVRLLVLMFWIPASSSDKTHTCPPCPAPEAAGGPSVFLFPPKPKDTLMISRTPEVTCVVVDVSHEDPEVKF
NWYVDGVEVHNAKTKPREEQYNSTYRVVSVLTVLHQDWLNGKEYKCKVSNKALGAPIEKTISKAKGQPREPQ
VYTLPPSRDELTKNQVSLYCLVKGFYPSDIAVEWESNGQPENNYKTTPPVLDSDGSFFLYSKLTVDKSRWQQG
NVFSCSVMHEALHNHYTQKSLSLSPGKGGSGGSGGSGGSGGSGGSGGSGGSGGSGGSGGSGGSGGSGGS
GGSGGSGGSGGSGGSGGSGCDLPQTHSLGSRRTLMLLAQMRKISLFSCLKDRHDFGFPQEEFGNQFQKAETIP
VLHEMIQQIFNLFSTKDSSAAWDETLLDKFYTELYQQLNDLEACVIQGVGVTETPLMKEDSILAVRKYFQRITLYLK
EKKYSPCAWEVVRAEIMASFSLSTNLQESLRSKE
P-960: pcDNA3.4-mouse light chain kappa-hIgGl-LALA-PG-YT (hole)-20*GGS-3LEC89-20*GGS+G-
IFNa2_R149A
(SEQ ID NO: 1439)
MKLPVRLLVLMFWIPASSSDKTHTCPPCPAPEAAGGPSVFLFPPKPKDTLMISRTPEVTCVVVDVSHEDPEVKF
NWYVDGVEVHNAKTKPREEQYNSTYRVVSVLTVLHQDWLNGKEYKCKVSNKALGAPIEKTISKAKGQPREPQ
VYTLPPSRDELTKNQVSLTCLVKGFYPSDIAVEWESNGQPENNYKTTPPVLDSDGSFFLTSKLTVDKSRWQQG
NVFSCSVMHEALHNHYTQKSLSLSPGKGGSGGSGGSGGSGGSGGSGGSGGSGGSGGSGGSGGSGGSGGS
GGSGGSGGSGGSGGSGGSQVQLQESGGGLVQPGGSLRLSCAASGRIFSVNAMGWYRQAPGKQRELVAAITN
QGAPTYADSVKGRFTISRDNAGNTVYLQMNSLRPEDTAVYYCKAFTRGDDYWGQGTQVTVSSGGSGGSGGSG
GSGGSGGSGGSGGSGGSGGSGGSGGSGGSGGSGGSGGSGGSGGSGGSGGSGCDLPQTHSLGSRRTLMLL
AQMRKISLFSCLKDRHDFGFPQEEFGNQFQKAETIPVLHEMIQQIFNLFSTKDSSAAWDETLLDKFYTELYQQLN
DLEACVIQGVGVTETPLMKEDSILAVRKYFQRITLYLKEKKYSPCAWEVVRAEIMASFSLSTNLQESLRSKE
P-961: pcDNA3.4-mouse Ig heavy chain-3LEC89-20*GGS-hIgG1-LALA-PG-YT (hole)-20*GGS+G-
IFNa2_R149A
(SEQ ID NO: 1440)
MGWSCIIFFLVATATGVHSQVQLQESGGGLVQPGGSLRLSCAASGRIFSVNAMGWYRQAPGKQRELVAAITNQ
GAPTYADSVKGRFTISRDNAGNTVYLQMNSLRPEDTAVYYCKAFTRGDDYWGQGTQVTVSSGGSGGSGGSGG
SGGSGGSGGSGGSGGSGGSGGSGGSGGSGGSGGSGGSGGSGGSGGSGGSDKTHTCPPCPAPEAAGGPS
VFLFPPKPKDILMISRTPEVTCVVVDVSHEDPEVKFNWYVDGVEVHNAKTKPREEQYNSTYRVVSVLTVLHQD
WLNGKEYKCKVSNKALGAPIEKTISKAKGQPREPQVYTLPPSRDELTKNQVSLICLVKGFYPSDIAVEWESNG
QPENNYKTIPPVLDSDGSFFLTSKLTVDKSRWQQGNVFSCSVMHEALHNHYTQKSLSLSPGKGGSGGSGGS
GGSGGSGGSGGSGGSGGSGGSGGSGGSGGSGGSGGSGGSGGSGGSGGSGGSGCDLPQTHSLGSRRTLML
LAQMRKISLFSCLKDRHDFGFPQEEFGNQFQKAETIPVLHEMIQQIFLFSTKDSSAAWDETLLDKFYTELYQQLN
DLEACVIQGVGVTETPLMKEDSILAVRKYFQRITLYLKEKKYSPCAWEVVRAEIMASFSLSTNWESLRSKE
P-962: pcDNA3.4-mouse light chain kappa-hIgG1-LALA-PG-TY (knob)
(SEQ ID NO: 1441)
MKLPVRLLVLMFWIPASSSDKTHTCPPCPAPEAAGGPSVFLFPPKPKDTLMISRTPEVTCVVVDVSHEDPEVKF
NWYVDGVEVHNAKTKPREEQYNSTYRVVSVLTVLHQDWLNGKEYKCKVSNKALGAPIEKTISKAKGQPREPQ
VYTLPPSRDELTKNQVSLYCLVKGFYPSDIAVEWESNGQPENNYKTTPPVLDSDGSFFLYSKLTVDKSRWQQG
NVFSCSVMHEALHNHYTQKSLSLSPGK

[1058] Different constructs were made by GeneArt (Thermo Fisher) and transiently expressed in the ExpiCHO expression system (Thermo Fisher) according to the manufacturer's guidelines. Ten days after transfection, supernatant was collected and cells removed by centrifugation. Recombinant proteins were purified from the medium using the rProtein A Sepharose Fast Flow resin (GE Healthcare) according to the manufacturer's guidelines. Average yields ranged from 70 to 200 mg per liter (see table below). SDS-PAGE under reducing (with added β-mercaptoethanol (β-mEtOH)) and non-reducing conditions (without β-mEtOH) (see FIG. 21, protein loaded in lanes A-E of the gels are described in table below) clearly showed that proteins are expressed as disulfide-linked complexes. Aberrant clustering (combination of two knob or two hole chains; extra bands on the gel, as shown by *, **, or *** in lanes D and E of gels without β-mEtOH) is observed in the heterodimeric Fc-based chimeric protein complexes D and E. Under reducing conditions, the two parts of the heterodimeric Fc-based chimeric protein complexes are nicely separated.

[1059] Heterodimeric Fc-based chimeric protein complexes appeared more soluble than the homodimeric proteins. In the latter case, even at concentrations below 1 mg/ml proteins tended to aggregate and precipitate. Protein melting analysis using SYPRO Orange (Sigma-Aldrich) on a LightCycler 480 System (Roche) illustrated that the melting temperatures of the different proteins were very comparable and ranged from 66 to 70° C.

| | | | | Yield (mg) per liter |
|---|---|---|---|---|
| Homodimeric | A | P-956 | Fc-3LEC89-IFNa2_R149A | 73, 2 |
| | B | P-957 | 3LEC89-Fc-IFNa2_R149A | 176, 8 |
| Heterodimeric | C | P-958 + P-959 | 3LEC89-Fc + Fc-IFNa2_R149A | 199, 2 |
| | D | P-960 + P-962 | Fc-3LEC89-IFNa2_R149A + Fc | 174, 8 |
| | E | P-961 + P-962 | 3LEC89-Fc-IFNa2_R149A + Fc | 156 |

[1060] To further estimate the stability of the proteins, the heterodimeric Fc-based chimeric protein complexes “C,” “D,” and “E” (see FIGS. 20A-E) were subjected to five cycles of freezing and thawing. Protein aggregates were removed by centrifugation just after thawing and protein concentrations were measured and plotted (see FIG. 22). Proteins C and D seemed more resistant to freezing-thawing than protein E.

### Example 2: Fc-Based Chimeric Protein Complex Characterization

[1061] Affinity of the heterodimeric Fc-based chimeric protein complexes for human Clec9A was determined using the bio-layer interferometry (BLI) technology on an Octet instrument (ForteBio). Recombinant Clec9A was biotinylated and trapped on Streptavidin sensors. Loaded tips were incubated with a serial dilution Fc-fusion. Shifts in the interference pattern were used to quantify the association and dissociation rates and thus the affinity. Data in the table below illustrates that the affinity is comparable in proteins C and E, while that in protein D was 10-fold lower.

| Sample ID | KD (M) | kon (1/Ms) | kdis (1/s) |
|---|---|---|---|
| 958 + 959 (C) | 2.61E−09 | 1.29E+05 | 3.37E−04 |
| 960 + 962 (D) | 3.16E−08 | 3.12E+04 | 9.88E−04 |
| 961 + 962 (E) | 3.88E−09 | 1.07E+05 | 4.16E−04 |

[1062] To study biological activity of the heterodimeric Fc-based chimeric protein complexes, 6-16 reporter activity was measured in parental and HL116-hClec9A cell-lines. The HL116 clone is derived from the human HT1080 cell line (ATCC CCL-121). It contains the firefly luciferase gene controlled by the IFN-inducible 6-16 promoter. Parental HL116 cells were transfected with an expression vector encoding the human Clec9A sequence. Stable transfected clones were selected in G418-containing medium. Parental HL116 and HL116-hClec9A cells were seeded overnight at 20,000 cells per 96-well, before stimulation with a serial dilution of IFNα2 as a positive control and Fc AFNs for 6 hours. Luciferase activity was measured in cell lysates. Data in FIG. 23 illustrate that homodimeric Fc-based chimeric protein complexes are slightly more active than the heterodimeric Fc-based chimeric protein complexes. In all cases activity on targeted cells vs activity on parental cells was observed at over a 10,000-fold difference.

### Example 3: Pharmacokinetic Study in Mouse

[1063] To evaluate the pharmacokinetic behavior of the Fc-based Actaferons (Fc-AFNs), the molecules P957 and P958/P959 (Example 1) were dosed intravenously at 1.5 mg/kg in 12 mice for each construct. K-EDTA blood was taken from a first group of 3 mice at 5 minutes, 8 hours and 2 days, from a second group of 3 mice at 15 minutes, 1 day and 4 days, from a third group of 3 mice at 1, 7 and 14 days and from a fourth group of 3 mice at 3 hours, 21 and 28 days. The concentration of intact Fc-AFN was measured by ELISA. In brief the MAXISORP Nunc Immune plates (Thermo Scientific) were coated overnight with anti-human interferon alpha mAb (clone MMHA-13; PBL Assay Science) at 0.5 μg/ml in PBS. After washing the plates four times with PBS+0.05% Tween-20, they were blocked with 0.1% Casein in PBS for at least 1 hour at room temperature. Subsequently, diluted samples and standards were incubated in 0.1% Casein in PBS for 2 hours at room temperature. After another wash cycle a custom made rabbit-anti-VHH (diluted 1/20000 in 0.1% Casein in PBS) was incubated for 2 hours at room temperature followed by an additional wash cycle and incubation with HRP-conjugated goat anti-rabbit (Jackson—111-035-144; 1:5000 in 0.1% Casein) for 1 hour at room temperature. After a final washing cycle, peroxidase activity was measured using KPL substrate (5120-0047; SeraCare) according to the manufacturer's instructions. Concentrations from samples were calculated using GraphPad Prism. Measured concentrations are plotted in FIG. 24. Terminal half-life was estimated on average at about 4.5 days P958/P959 and at about 3.25 days for P957.

### Example 4: Efficacy Study in Humanized Mouse

[1064] To evaluate the in vivo efficacy of Fc-based AFNs the molecules P957 and P958/P959 (Example 1; targeted to human CLEC9A, a highly specific conventional dendritic cell 1 (cDC1) marker) were tested in a tumor model in a humanized mouse. In brief, newborn NSG mice (1-2 days of age) were sublethal irradiated with 100 cGy prior to intrahepatic delivery of 1×10⁵CD34+ human stem cells (from HLA-A2 positive cord bloods). At week 13 after stem cell transfer mice were subcutaneously inoculated with 25×10⁵ human RL follicular lymphoma cells (ATCC CRL-2261; not sensitive to the direct anti-proliferative effect of interferons (IFN)). Mice were treated daily intraperitoneally with 30 μg of human FMS-like tyrosine kinase 3 ligand (Flt3L) protein, from day 6 to day 17 after tumor inoculation. Weekly intravenous injection with buffer or Fc-AFN (25 μg) was initiated at day 10 after tumor inoculation, when a palpable tumor was visible (n=6 mice per group). Tumor size (caliper measurements), body weight and temperature were assessed daily. FIG. 25 shows the tumor growth until 7 days after the second treatment (mice received weekly injections with either PBS or AFN, the data show tumor growth up to 7 days after the second weekly treatment) and demonstrates that all constructs induced a similar level of tumor growth inhibition. Data on body weight and temperature did not show any major difference between buffer treatment and AFN treatment supporting that the AFN treatment was well tolerated.

### Example 5: Linker Lengths Heterodimeric Constructs

[1065] In the heterodimeric Fc AFN configuration of Examples 1 and 2, 20*GGS linkers between VHH and Fc as well as between Fc and IFN were used. The effect on different lengths of these linkers on biological activity (HL116-hClec9A reporter) or affinity for Clec9A in bio-layer interferometry (BLI) was evaluated.

[1066] In this and following Examples, various Fc variants are as follows (amino acids numbers refer to EU convention (PNAS, Edelman et al., 1969; 63 (1) 78-85)):
[1067] Fc: hIgG1 Fc_L234A_L235A_P329G (where L234A, L235A, and P329G are mutations in the hIgG1 Fc sequence)
[1068] Fc1: Ridgway hole: hIgG1 Fc_L234A_L235A_P329G_Y407T (where L234A, L235A, P329G, and Y407T are mutations in the hIgG1 Fc1 sequence)
[1069] Fc2: Ridgway knob: hIgG1 Fc_L234A_L235A_P329G_T366Y (where L234A, L235A, P329G and T366Y are mutations in the hIgG1 Fc sequence)

[1070] The leader sequences used for expression are identical as those in Example 1 and not further detailed in any of the constructs as of this Example.

[1071] The linkers used consist of a number of GGS repeats optionally followed by an additional single glycine residue.

[1072] They are referred to a nGGS where n represents the number of GGS repeats, the optional additional G is not separately indicated in the construct name.

### Constructs:

R1CHCL50_opt4-5*GGS-Fc1(P-1105)
(SEQ ID NO: 1442)
DVQLVESGGGLVQPGGSLRLSCAASGSFSSINVMGVVYRQAPGKERELVARITNLGLPNYADSVKGRFTIS
RDNSKNTVYLQMNSLRPEDTAVYYCYLVALKAEYWGQGTLVTVSSGGSGGSGGSGGSGGSDKTHTCPP
CPAPEAAGGPSVFLFPPKPKDTLMISRTPEVTCVVVDVSHEDPEVKFNVVYVDGVEVHNAKTKPREEQYNS
TYRVVSVLTVLHQDWLNGKEYKCKVSNKALGAPIEKTISKAKGQPREPQVYTLPPSRDELTKNQVSLTCLV
KGFYPSDIAVEWESNGQPENNYKTTPPVLDSDGSFFLTSKLTVDKSRWQQGNVFSCSVMHEALHNHYTQ
KSLSLSPGK
R1CHCL50_opt4-3*GGS-Fc1(P-1106)
(SEQ ID NO: 1443)
DVQLVESGGGLVQPGGSLRLSCAASGSFSSINVMGVVYRQAPGKERELVARITNLGLPNYADSVKGRFTIS
RDNSKNTVYLQMNSLRPEDTAVYYCYLVALKAEYWGQGTLVTVSSGGSGGSGGSDKTHTCPPCPAPEAA
GGPSVFLFPPKPKDTLMISRTPEVTCVVVDVSHEDPEVKFNVVYVDGVEVHNAKTKPREEQYNSTYRVVSV
LTVLHQDWLNGKEYKCKVSNKALGAPIEKTISKAKGQPREPQVYTLPPSRDELTKNQVSLTCLVKGFYPSDI
AVEWESNGQPENNYKTTPPVLDSDGSFFLTSKLTVDKSRWQQGNVFSCSVMHEALHNHYTQKSLSLSPG
K
3LEC89_opt4-5*GGS-Fc1(P-1107)
(SEQ ID NO: 1444)
DVQLVESGGGLVQPGGSLRLSCAASGRIFSVNAMGVVYRQAPGKQRELVAAITNQGAPTYADSVKGRFTIS
RDNSKNTVYLQMNSLRPEDTAVYYCKAFTRGDDYWGQGTLVTVSSGGSGGSGGSGGSGGSDKTHTCPP
CPAPEAAGGPSVFLFPPKPKDTLMISRTPEVTCVVVDVSHEDPEVKFNVVYVDGVEVHNAKTKPREEQYNS
TYRVVSVLTVLHQDWLNGKEYKCKVSNKALGAPIEKTISKAKGQPREPQVYTLPPSRDELTKNQVSLTCLV
KGFYPSDIAVEWESNGQPENNYKTTPPVLDSDGSFFLTSKLTVDKSRWQQGNVFSCSVMHEALHNHYTQ
KSLSLSPGK
3LEC89_opt4-3*GGS-Fc1(P-1108)
(SEQ ID NO: 1445)
DVQLVESGGGLVQPGGSLRLSCAASGRIFSVNAMGVVYRQAPGKQRELVAAITNQGAPTYADSVKGRFTIS
RDNSKNTVYLQMNSLRPEDTAVYYCKAFTRGDDYWGQGTLVTVSSGGSGGSGGSDKTHTCPPCPAPEA
AGGPSVFLFPPKPKDTLMISRTPEVTCVVVDVSHEDPEVKFNWYVDGVEVHNAKTKPREEQYNSTYRVVS
VLTVLHQDWLNGKEYKCKVSNKALGAPIEKTISKAKGQPREPQVYTLPPSRDELTKNQVSLTCLVKGFYPS
DIAVEWESNGQPENNYKTTPPVLDSDGSFFLTSKLTVDKSRWQQGNVFSCSVMHEALHNHYTQKSLSLSP
GK
Fc2-10*GGS-IFNa2_R149A(P-1109)
(SEQ ID NO: 1446)
DKTHTCPPCPAPEAAGGPSVFLFPPKPKDTLMISRTPEVTCVVVDVSHEDPEVKFNWYVDGVEVHNAKTK
PREEQYNSTYRWSVLTVLHQDWLNGKEYKCKVSNKALGAPIEKTISKAKGQPREPQVYTLPPSRDELTKN
QVSLYCLVKGFYPSDIAVEWESNGQPENNYKTTPPVLDSDGSFFLYSKLTVDKSRWQQGNVFSCSVMHEA
LHNHYTQKSLSLSPGKGGSGGSGGSGGSGGSGGSGGSGGSGGSGGSGCDLPQTHSLGSRRTLMLLAQ
MRKISLFSCLKDRHDFGFPQEEFGNQFQKAETIPVLHEMIQQIFNLFSTKDSSAAWDETLLDKFYTELYQQL
NDLEACVIQGVGVTETPLMKEDSILAVRKYFQRITLYLKEKKYSPCAWEVVRAEIMASFSLSTNLQESLRSKE
Fc2-5*GGS-IFNa2_R149A(P-1110)
(SEQ ID NO: 1447)
DKTHTCPPCPAPEAAGGPSVFLFPPKPKDTLMISRTPEVTCVVVDVSHEDPEVKFNWYVDGVEVHNAKTK
PREEQYNSTYRWSVLTVLHQDWLNGKEYKCKVSNKALGAPIEKTISKAKGQPREPQVYTLPPSRDELTKN
QVSLYCLVKGFYPSDIAVEWESNGQPENNYKTTPPVLDSDGSFFLYSKLTVDKSRWQQGNVFSCSVMHEA
LHNHYTQKSLSLSPGKGGSGGSGGSGGSGGSGCDLPQTHSLGSRRTLMLLAQMRKISLFSCLKDRHDFG
FPQEEFGNQFQKAETIPVLHEMIQQIFNLFSTKDSSAAWDETLLDKFYTELYQQLNDLEACVIQGVGVTETP
LMKEDSILAVRKYFQRITLYLKEKKYSPCAWEVVRAEIMASFSLSTNLQESLRSKE
Fc2-3*GGS-IFNa2_R149A(P-1111)
(SEQ ID NO: 1448)
DKTHTCPPCPAPEAAGGPSVFLFPPKPKDTLMISRTPEVTCVVVDVSHEDPEVKFNWYVDGVEVHNAKTK
PREEQYNSTYRWSVLTVLHQDWLNGKEYKCKVSNKALGAPIEKTISKAKGQPREPQVYTLPPSRDELTKN
QVSLYCLVKGFYPSDIAVEWESNGQPENNYKTTPPVLDSDGSFFLYSKLTVDKSRWQQGNVFSCSVMHEA
LHNHYTQKSLSLSPGKGGSGGSGGSGCDLPQTHSLGSRRTLMLLAQMRKISLFSCLKDRHDFGFPQEEFG
NQFQKAETIPVLHEMIQQ1FNLFSTKDSSAAWDETLLDKFYTELYQQLNDLEACVIQGVGVTETPLMKEDSIL
AVRKYFQRITLYLKEKKYSPCAWEVVRAEIMASFSLSTNLQESLRSKE

### Production and Purification of Linker-Length Variants

[1074] Different constructs were made by GeneArt (Thermo Fisher) and combinations of hole (Fc1-based) and knob (Fc2-based) were combined to a heterodimeric configuration similar to the construct P958/959 of Example 1 as outlined in FIG. 7B, and transiently expressed in the ExpiCHO expression system (Thermo Fisher) according to the manufacturer's guidelines. One week after transfection, supernatant was collected and cells removed by centrifugation. Recombinant proteins were purified from the supernatant using the Pierce Protein A spin plates (Thermo Fisher). Variations in linker-lengths appeared not to affect the production (yields ranging from 100 to 300 mg per liter) and stability of the resulting proteins.

### Biological Activity on HL116 Reporter Cell Lines

[1075] The HL116 clone is derived from the human HT1080 cell line (ATCC CCL-121). It contains the firefly luciferase gene controlled by the IFN-inducible 6-16 promoter. Parental HL116 cells were transfected with an expression vector encoding the human Clec9A sequence. Stable transfected clones were selected in G418-containing medium. Parental HL116 and HL116-hClec9A cells were seeded overnight at 20,000 cells per 96-well and subsequently stimulated with a serial dilution of Fc AFNs for 6 hours. Luciferase activity was measured in cell lysates. Data in the FIG. 26 and Table 6 illustrate that variations in linker-length had no major effects on biological activity in targeted cells (HL116-hClec9A cells). Of note the biological activity measured for any of the 3LEC89-5*GGS-Fc1 based constructs is also comparable to the biological activity measured for 3LEC89-20*GGS-Fc1/Fc2-20*GGS-IFNα2_R149A as measured in Example 2.

TABLE 6
Biological activity of linker-length variants on H L116 cells.
Summary of EC₅₀ (ng/ml) values of the biological
activity measured in FIG. 26.

| | EC₅₀ (ng/ml) | | | |
|---|---|---|---|---|
| | R1CHCL50- | R1CHCL50- | 3LEC89- | 3LEC89- |
| | 5*GGS-Fc1 | 3*GGS-Fc1 | 5*GGS-Fc1 | 3*GGS-Fc1 |
| Fc2-10*GGS- | 2.04 | 3.37 | 1.52 | 3.11 |
| IFNa2_R149A | | | | |
| Fc2-5*GGS | 1.89 | 4.33 | 1.14 | 3.22 |
| IFNa2_R149A | | | | |
| Fc2-3*GGS- | 2.42 | 3.63 | 1.15 | 2.35 |
| IFNa2_R149A | | | | |

Affinity for hClec9A

[1076] Affinity of the linker-length variants for human Clec9A was determined using the bio-layer interferometry (BLI) technology on an Octet instrument (ForteBio). Recombinant Clec9A was therefore biotinylated and trapped on a Streptavidin sensors (ForteBio). Loaded tips were incubated with a serial dilution Fc-fusions. In this experiment, 3LEC89 and R1CHCL50 hole constructs were combined with 5*GGS or 3*GGS linkers with the 10*GGS knob construct and compared with the original 3LEC89 configuration with two 20*GGS linkers. Shifts in the interference pattern were used to quantify the association and dissociation rates (and thus the affinity). Data, summarized in Table 7, show that shortening of the linkers does not have a negative impact on the affinity for hClec9A.

TABLE 7
Affinity of linker-length variants for hClec9A

| | KD (M) | KD Error | ka (1/Ms) | ka Error | kdis (1/s) | kdis Error |
|---|---|---|---|---|---|---|
| 3LEC89-20*GGS-Fc1 + | 7.50E−09 | 3.72E−11 | 1.07E+05 | 3.26E+02 | 8.00E−04 | 3.15E−06 |
| Fc2-20*GGS- | | | | | | |
| IFNa2_R149A | | | | | | |
| 3LEC89-5*GGS-Fc1 + | 8.42E+09 | 5.76E−11 | 1.23E+05 | 5.82E+02 | 1.00E−03 | 5.10E−06 |
| Fc2-10*GGS- | | | | | | |
| IFNa2_R149A | | | | | | |
| 3LEC89-3*GGS-Fc1 + | 3.12E−09 | 2.20E−11 | 1.67E+05 | 4.86E+02 | 5.00E−04 | 3.35E−06 |
| Fc2-10*GGS- | | | | | | |
| IFNa2_R149A | | | | | | |
| R1CHCL50-5*GGS-Fc1 + | 7.46E−09 | 3.76E−11 | 1.60E+05 | 5.76E+02 | 1.20E−03 | 4.20E−06 |
| Fc2-10*GGS- | | | | | | |
| IFNa2_R149A | | | | | | |
| R1CHCL50-3*GGS-Fc1 + | 1.20E−08 | 9.07E−11 | 1.39E+05 | 8.59E+02 | 1.70E−03 | 7.26E−06 |
| Fc2-10*GGS- | | | | | | |
| IFNa2_R149A | | | | | | |

### Example 6: Linker Lengths Homodimeric Constructs

[1077] In the homodimeric Fc AFN configuration of Examples 1 and 2, 20*GGS linkers between VHH and Fc as well as between Fc and IFN were used. The effect on different lengths of these linkers on biological activity (HL116-hClec9A reporter) was evaluated.

### Constructs:

3LEC89_opt4-10*GGS-Fc-10*GGS-IFNa2_R149A(P-1144)
(SEQ ID NO: 1449)
DVQLVESGGGLVQPGGSLRLSCAASGRIFSVNAMGWYRQAPGKQRELVAAITNQGAPTYADSVKGRFTIS
RDNSKNTVYLQMNSLRPEDTAVYYCKAFTRGDDYWGQGTLVTVSSGGSGGSGGSGGSGGSGGSGGSG
GSGGSGGSDKTHTCPPCPAPEAAGGPSVFLFPPKPKDTLMISRTPEVTCVVVDVSHEDPEVKFNWYVDGV
EVHNAKTKPREEQYNSTYRVVSVLTVLHQDWLNGKEYKCKVSNKALGAPIEKTISKAKGQPREPQVYTLPP
SRDELTKNQVSLTCLVKGFYPSDIAVEWESNGQPENNYKTTPPVLDSDGSFFLYSKLTVDKSRWQQGNVF
SCSVMHEALHNHYTQKSLSLSPGKGGSGGSGGSGGSGGSGGSGGSGGSGGSGGSGCDLPQTHSLGSR
RTLMLLAQMRKISLFSCLKDRHDFGFPQEEFGNQFQKAETIPVLHEMIQQIFNLFSTKDSSAAWDETLLDKF
YTELYQQLNDLEACVIQGVGVTETPLMKEDSILAVRKYFQRITLYLKEKKYSPCAWEVVRAEIMASFSLSTNL
QESLRSKE
3LEC89_opt4-5*GGS-Fc-5*GGS-IFNa2_R149A(P-1145)
(SEQ ID NO: 1450)
DVQLVESGGGLVQPGGSLRLSCAASGRIFSVNAMGWYRQAPGKQRELVAAITNQGAPTYADSVKGRFTIS
RDNSKNTVYLQMNSLRPEDTAVYYCKAFTRGDDYWGQGTLVTVSSGGSGGSGGSGGSGGSDKTHTCPP
CPAPEAAGGPSVFLFPPKPKDTLMISRTPEVTCVVVDVSHEDPEVKFNWYVDGVEVHNAKTKPREEQYNS
TYRVVSVLTVLHQDWLNGKEYKCKVSNKALGAPIEKTISKAKGQPREPQVYTLPPSRDELTKNQVSLTCLV
KGFYPSDIAVEWESNGQPENNYKTTPPVLDSDGSFFLYSKLTVDKSRWQQGNVFSCSVMHEALHNHYTQ
KSLSLSPGKGGSGGSGGSGGSGGSGCDLPQTHSLGSRRTLMLLAQMRKISLFSCLKDRHDFGFPQEEFG
NQFQKAETIPVLHEMIQQIFNLFSTKDSSAAWDETLLDKFYTELYQQLNDLEACVIQGVGVTETPLMKEDSIL
AVRKYFQRITLYLKEKKYSPCAWEVVRAEIMASFSLSTNLQESLRSKE
3LEC89_opt4-3*GGS-Fc-3*GGS-IFNa2_R149A(P-1146)
(SEQ ID NO: 1451)
DVQLVESGGGLVQPGGSLRLSCAASGRIFSVNAMGWYRQAPGKQRELVAAITNQGAPTYADSVKGRFTIS
RDNSKNTVYLQMNSLRPEDTAVYYCKAFTRGDDYWGQGTLVTVSSGGSGGSGGSDKTHTCPPCPAPEA
AGGPSVFLFPPKPKDTLMISRTPEVTCVVVDVSHEDPEVKFNWYVDGVEVHNAKTKPREEQYNSTYRVVS
VLTVLHQDWLNGKEYKCKVSNKALGAPIEKTISKAKGQPREPQVYTLPPSRDELTKNQVSLTCLVKGFYPS
DIAVEWESNGQPENNYKTTPPVLDSDGSFFLYSKLTVDKSRWQQGNVFSCSVMHEALHNHYTQKSLSLSP
GKGGSGGSGGSGCDLPQTHSLGSRRTLMLLAQMRKISLFSCLKDRHDFGFPQEEFGNQFQKAETIPVLHE
MIQQIFNLFSTKDSSAAWDETLLDKFYTELYQQLNDLEACVIQGVGVTETPLMKEDSILAVRKYFQRITLYLK
EKKYSPCAWEVVRAEIMASFSLSTNLQESLRSKE
3LE089_opt4-AAA-Fc-AAA+G-IFNa2_R149A(P-1147)
(SEQ ID NO: 1452)
DVQLVESGGGLVQPGGSLRLSCAASGRIFSVNAMGWYRQAPGKQRELVAAITNQGAPTYADSVKGRFTIS
RDNSKNTVYLQMNSLRPEDTAVYYCKAFTRGDDYWGQGTLVTVSSAAADKTHTCPPCPAPEAAGGPSVF
LFPPKPKDTLMISRTPEVTCVVVDVSHEDPEVKFNWYVDGVEVHNAKTKPREEQYNSTYRVVSVLTVLHQD
WLNGKEYKCKVSNKALGAPIEKTISKAKGQPREPQVYTLPPSRDELTKNQVSLTCLVKGFYPSDIAVEWES
NGQPENNYKTTPPVLDSDGSFFLYSKLTVDKSRWQQGNVFSCSVMHEALHNHYTQKSLSLSPGKAAAGC
DLPQTHSLGSRRTLMLLAQMRKISLFSCLKDRHDFGFPQEEFGNQFQKAETIPVLHEMIQQIFNLFSTKDSS
AAWDETLLDKFYTELYQQLNDLEACVIQGVGVTETPLMKEDSILAVRKYFQRITLYLKEKKYSPCAWEVVRA
EIMASFSLSTNLQESLRSKE

### Production and Purification of Linker-Length Variants

[1079] The different constructs were made by GeneArt (Thermo Fisher) similar to the construct P957 of Example 1 as outlined in FIG. 1A, and transiently expressed in the ExpiCHO expression system (Thermo Fisher) according to the manufacturer's guidelines. One week after transfection, supernatant was collected and cells removed by centrifugation. Recombinant proteins were purified from the supernatant using the Pierce Protein A spin plates (Thermo Fisher).

### Biological Activity on HL116 Reporter Cell Lines

[1080] The HL116 clone is derived from the human HT1080 cell line (ATCC CCL-121). It contains the firefly luciferase gene controlled by the IFN-inducible 6-16 promoter. Parental HL116 cells were transfected with an expression vector encoding the human Clec9A sequence. Stable transfected clones were selected in G418-containing medium. Parental HL116 and HL116-hClec9A cells were seeded overnight at 20,000 cells per 96-well and subsequently stimulated with a serial dilution of Fc AFNs for 6 hours. Luciferase activity was measured in cell lysates. Data in Table 8 illustrate that variations in linker-length had no major effects on biological activity in targeted cells (HL116-hClec9A cells).

TABLE 8
Biological activity of linker-length homodimeric variants on HL116 cells

| | EC₅₀ (ng/ml) |
|---|---|
| 3LEC89(opt4)-10*GGS-Fc-10*GGS-IFNa2_R149A | 1.77 |
| 3LEC89(opt4)-5*GGS-Fc-5*GGS-IFNa2_R149A | 2.80 |
| 3LEC89(opt4)-3*GGS-Fc-3*GGS-IFNa2_R149A | 2.33 |
| 3LEC89(0pt4)-AAA-Fc-AAA-IFNa2_R149A | 2.79 |

### Example 7: Alternative Effector Mutations

[1081] To diminish the effector functions, i.e. complement dependent cytotoxicity (CDC) or antibody dependent cellular cytotoxicity (ADCC), of the Fc domain, the L234A_L235A mutations which mainly affect Fc-gamma receptor binding were combined with four extra Fc effector-mutations (P329G, K322Q, K322A or P331S) to further reduce complement binding. These mutations were applied to the 3LEC89-based heterodimeric Fc format with 20*GGS linkers. Resulting proteins were tested for biological activity (HL116-hClec9A reporter) and complement binding (BLI; Octet).

### Constructs:

3LEC89-20*GGS-Fc1_P329G(P-958)
(SEQ ID NO: 1453)
QVQLQESGGGLVQPGGSLRLSCAASGRIFSVNAMGVVYRQAPGKQRELVAAITNQGAPTYADSVKGRFTIS
RDNAGNTVYLQMNSLRPEDTAVYYCKAFTRGDDYWGQGTQVTVSSGGSGGSGGSGGSGGSGGSGGSG
GSGGSGGSGGSGGSGGSGGSGGSGGSGGSGGSGGSGGSDKTHTCPPCPAPEAAGGPSVFLFPPKPKD
TLMISRTPEVTCWVDVSHEDPEVKFNVVYVDGVEVHNAKTKPREEQYNSTYRVVSVLTVLHQDWLNGKEY
KCKVSNKALGAPIEKTISKAKGQPREPQVYTLPPSRDELTKNQVSLTCLVKGFYPSDIAVEWESNGQPENN
YKTTPPVLDSDGSFFLTSKLTVDKSRWQQGNVFSCSVMHEALHNHYTQKSLSLSPGK
Fc2_P329G-20*GGS-IFNa2_R149A(P-959)
(SEQ ID NO: 1454)
DKTHTCPPCPAPEAAGGPSVFLFPPKPKDTLMISRTPEVTCVVVDVSHEDPEVKFNWYVDGVEVHNAKTK
PREEQYNSTYRWSVLTVLHQDWLNGKEYKCKVSNKALGAPIEKTISKAKGQPREPQVYTLPPSRDELTKN
QVSLYCLVKGFYPSDIAVEWESNGQPENNYKTTPPVLDSDGSFFLYSKLTVDKSRWQQGNVFSCSVMHEA
LHNHYTQKSLSLSPGKGGSGGSGGSGGSGGSGGSGGSGGSGGSGGSGGSGGSGGSGGSGGSGGSG
GSGGSGGSGGSGCDLPQTHSLGSRRTLMLLAQMRKISLFSCLKDRHDFGFPQEEFGNQFQKAETIPVLHE
MIQQIFNLFSTKDSSAAWDETLLDKFYTELYQQLNDLEACVIQGVGVTETPLMKEDSILAVRKYFQRITLYLK
EKKYSPCAWEVVRAEIMASFSLSTNLQESLRSKE
3LEC89-20*GGS-Fc1_K322Q(P-1074)
(SEQ ID NO: 1455)
QVQLQESGGGLVQPGGSLRLSCAASGRIFSVNAMGVVYRQAPGKQRELVAAITNQGAPTYADSVKGRFTIS
RDNAGNTVYLQMNSLRPEDTAVYYCKAFTRGDDYWGQGTQVTVSSGGSGGSGGSGGSGGSGGSGGSG
GSGGSGGSGGSGGSGGSGGSGGSGGSGGSGGSGGSGGSDKTHTCPPCPAPEAAGGPSVFLFPPKPKD
TLMISRTPEVTCWVDVSHEDPEVKFNVVYVDGVEVHNAKTKPREEQYNSTYRVVSVLTVLHQDWLNGKEY
KCQVSNKALPAPIEKTISKAKGQPREPQVYTLPPSRDELTKNQVSLTCLVKGFYPSDIAVEWESNGQPENN
YKTTPPVLDSDGSFFLTSKLTVDKSRWQQGNVFSCSVMHEALHNHYTQKSLSLSPGK
Fc2_K322Q-20*GGS-IFNa2_R149A(P-1077)
(SEQ ID NO: 1456)
DKTHTCPPCPAPEAAGGPSVFLFPPKPKDTLMISRTPEVTCVVVDVSHEDPEVKFNWYVDGVEVHNAKTK
PREEQYNSTYRWSVLTVLHQDWLNGKEYQCKVSNKALPAPIEKTISKAKGQPREPQVYTLPPSRDELTKN
QVSLYCLVKGFYPSDIAVEWESNGQPENNYKTTPPVLDSDGSFFLYSKLTVDKSRWQQGNVFSCSVMHEA
LHNHYTQKSLSLSPGKGGSGGSGGSGGSGGSGGSGGSGGSGGSGGSGGSGGSGGSGGSGGSGGSG
GSGGSGGSGGSGCDLPQTHSLGSRRTLMLLAQMRKISLFSCLKDRHDFGFPQEEFGNQFQKAETIPVLHE
MIQQIFNLFSTKDSSAAWDETLLDKFYTELYQQLNDLEACVIQGVGVTETPLMKEDSILAVRKYFQRITLYLK
EKKYSPCAWEVVRAEIMASFSLSTNLQESLRSKE
3LEC89-20*GGS-Fc1_K322A(P-1073)
(SEQ ID NO: 1457)
QVQLQESGGGLVQPGGSLRLSCAASGRIFSVNAMGVVYRQAPGKQRELVAAITNQGAPTYADSVKGRFTIS
RDNAGNTVYLQMNSLRPEDTAVYYCKAFTRGDDYWGQGTQVTVSSGGSGGSGGSGGSGGSGGSGGSG
GSGGSGGSGGSGGSGGSGGSGGSGGSGGSGGSGGSGGSDKTHTCPPCPAPEAAGGPSVFLFPPKPKD
TLMISRTPEVTCVVVDVSHEDPEVKFNVVYVDGVEVHNAKTKPREEQYNSTYRVVSVLTVLHQDWLNGKEY
KCAVSNKALPAPIEKTISKAKGQPREPQVYTLPPSRDELTKNQVSLTCLVKGFYPSDIAVEWESNGQPENNY
KTTPPVLDSDGSFFLTSKLTVDKSRWQQGNVFSCSVMHEALHNHYTQKSLSLSPGK
Fc2_K322A-20*GGS-IFNa2_R149A(P-1076)
(SEQ ID NO: 1458)
DKTHTCPPCPAPEAAGGPSVFLFPPKPKDTLMISRTPEVTCVVVDVSHEDPEVKFNWYVDGVEVHNAKTK
PREEQYNSTYRWSVLTVLHQDWLNGKEYKCAVSNKALPAPIEKTISKAKGQPREPQVYTLPPSRDELTKN
QVSLYCLVKGFYPSDIAVEWESNGQPENNYKTTPPVLDSDGSFFLYSKLTVDKSRWQQGNVFSCSVMHEA
LHNHYTQKSLSLSPGKGGSGGSGGSGGSGGSGGSGGSGGSGGSGGSGGSGGSGGSGGSGGSGGSG
GSGGSGGSGGSGCDLPQTHSLGSRRTLMLLAQMRKISLFSCLKDRHDFGFPQEEFGNQFQKAETIPVLHE
MIQQIFNLFSTKDSSAAWDETLLDKFYTELYQQLNDLEACVIQGVGVTETPLMKEDSILAVRKYFQRITLYLK
EKKYSPCAWEVVRAEIMASFSLSTNLQESLRSKE
3LEC89-20*GGS-Fc1_P331S(P-1075)
(SEQ ID NO: 1459)
QVQLQESGGGLVQPGGSLRLSCAASGRIFSVNAMGVVYRQAPGKQRELVAAITNQGAPTYADSVKGRFTIS
RDNAGNTVYLQMNSLRPEDTAVYYCKAFTRGDDYWGQGTQVTVSSGGSGGSGGSGGSGGSGGSGGSG
GSGGSGGSGGSGGSGGSGGSGGSGGSGGSGGSGGSGGSDKTHTCPPCPAPEAAGGPSVFLFPPKPKD
TLMISRTPEVTCVVVDVSHEDPEVKFNVVYVDGVEVHNAKTKPREEQYNSTYRVVSVLTVLHQDWLNGKEY
KCKVSNKALPASIEKTISKAKGQPREPQVYTLPPSRDELTKNQVSLTCLVKGFYPSDIAVEWESNGQPENNY
KTTPPVLDSDGSFFLTSKLTVDKSRWQQGNVFSCSVMHEALHNHYTQKSLSLSPGK
Fc2_P331S-20*GGS-IFNa2_R149A(P-1078)
(SEQ ID NO: 1460)
DKTHTCPPCPAPEAAGGPSVFLFPPKPKDTLMISRTPEVTCVVVDVSHEDPEVKFNWYVDGVEVHNAKTK
PREEQYNSTYRWSVLTVLHQDWLNGKEYKCKVSNKALPASIEKTISKAKGQPREPQVYTLPPSRDELTKN
QVSLYCLVKGFYPSDIAVEWESNGQPENNYKTTPPVLDSDGSFFLYSKLTVDKSRWQQGNVFSCSVMHEA
LHNHYTQKSLSLSPGKGGSGGSGGSGGSGGSGGSGGSGGSGGSGGSGGSGGSGGSGGSGGSGGSG
GSGGSGGSGGSGCDLPQTHSLGSRRTLMLLAQMRKISLFSCLKDRHDFGFPQEEFGNQFQKAETIPVLHE
MIQQIFNLFSTKDSSAAWDETLLDKFYTELYQQLNDLEACVIQGVGVTETPLMKEDSILAVRKYFQRITLYLK
EKKYSPCAWEVVRAEIMASFSLSTNLQESLRSKE

### Production and Purification of Effector Mutations Variants

[1083] 3LEC89-based Fc AFNs with different effector-mutations were produced in ExpiCHO cells as heterodimeric AFNs outlined in FIG. 7B, and as described in previous Examples. Recombinant proteins were purified from the supernatant using the Pierce Protein A spin plates (Thermo Fisher) according to the manufacturer's guidelines. No major difference in production yields (between 50 and 150 μg/ml) and stability were observed among the different mutants.

### Biological Activity on HL116 Reporter Cell Lines

[1084] Biological activities of the alternative effector-mutants were measured as described in previous Examples. In brief, parental HL116 and the derived HL116-hClec9A were stimulated for 6 hours with a serial dilution of Fc-AFNs. Luciferase activity was measured and plotted in FIG. 27. Data clearly illustrate that resulting mutants show a very comparable biological activation profile on targeted (HL116-hClec9A) and untargeted (parental HL116) cells with EC₅₀ values varying from 0.3 to 0.65 ng/ml.

### Affinity for Complement (C1q)

[1085] The effect of the different effector-mutations on the affinity for Complement Component C1 q (C1q) was determined using the bio-layer interferometry (BLI) technology on an Octet instrument (ForteBio). Fc AFNs with the different mutations or a hIgG1 as a positive control were loaded onto a Protein A bio-sensor (ForteBio) and subsequently incubated with recombinant C1q (100 nM; ProSpec). Data in FIG. 28 clearly illustrate that all effector-variants greatly lost their ability to bind to C1q, and that no significant differences between mutants could be observed.

### Example 8: IFNα2 Variants

[1086] Here, we evaluate the effect of mutation of the hIFNα2 O-glycosylation site on position 106 (T106) and compare biological activity of two natural IFNα2 variants: IFNα2A and IFNα2B.

### Constructs:

R1CHCL50_opt4-5*GGS-Fc1(P-1105)
(SEQ ID NO: 1461)
DVQLVESGGGLVQPGGSLRLSCAASGSFSSINVMGVVYRQAPGKERELVARITNLGLPNYADSVKGRFTIS
RDNSKNTVYLQMNSLRPEDTAVYYCYLVALKAEYWGQGTLVTVSSGGSGGSGGSGGSGGSDKTHTCPP
CPAPEAAGGPSVFLFPPKPKDTLMISRTPEVTCVVVDVSHEDPEVKFNVVYVDGVEVHNAKTKPREEQYNS
TYRWSVLTVLHQDWLNGKEYKCKVSNKALGAPIEKTISKAKGQPREPQVYTLPPSRDELTKNQVSLTCLV
KGFYPSDIAVEWESNGQPENNYKTTPPVLDSDGSFFLTSKLTVDKSRWQQGNVFSCSVMHEALHNHYTQ
KSLSLSPGK
3LEC89_opt4-5*GGS-Fc1(P-1077)
(SEQ ID NO: 1462)
DVQLVESGGGLVQPGGSLRLSCAASGRIFSVNAMGVVYRQAPGKQRELVAAITNQGAPTYADSVKGRFTIS
RDNSKNTVYLQMNSLRPEDTAVYYCKAFTRGDDYWGQGTLVTVSSGGSGGSGGSGGSGGSDKTHTCPP
CPAPEAAGGPSVFLFPPKPKDTLMISRTPEVTCVVVDVSHEDPEVKFNWYVDGVEVHNAKTKPREEQYNS
TYRVVSVLTVLHQDWLNGKEYKCKVSNKALGAPIEKTISKAKGQPREPQVYTLPPSRDELTKNQVSLTCLV
KGFYPSDIAVEWESNGQPENNYKTTPPVLDSDGSFFLTSKLTVDKSRWQQGNVFSCSVMHEALHNHYTQ
KSLSLSPGK
Fc2-10*GGS-IFNa2A_R149A(P-1109)
(SEQ ID NO: 1463)
DKTHTCPPCPAPEAAGGPSVFLFPPKPKDTLMISRTPEVTCVVVDVSHEDPEVKFNWYVDGVEVHNAKTK
PREEQYNSTYRWSVLTVLHQDWLNGKEYKCKVSNKALGAPIEKTISKAKGQPREPQVYTLPPSRDELTKN
QVSLYCLVKGFYPSDIAVEWESNGQPENNYKTTPPVLDSDGSFFLYSKLTVDKSRWQQGNVFSCSVMHEA
LHNHYTQKSLSLSPGKGGSGGSGGSGGSGGSGGSGGSGGSGGSGGSGCDLPQTHSLGSRRTLMLLAQ
MRKISLFSCLKDRHDFGFPQEEFGNQFQKAETIPVLHEMIQQIFNLFSTKDSSAAWDETLLDKFYTELYQQL
NDLEACVIQGVGVTETPLMKEDSILAVRKYFQRITLYLKEKKYSPCAWEVVRAEIMASFSLSTNLQESLRSKE
Fc2-10*GGS-IFNa2A_T106A-R149A(P-1302)
(SEQ ID NO: 1464)
DKTHTCPPCPAPEAAGGPSVFLFPPKPKDTLMISRTPEVTCVVVDVSHEDPEVKFNWYVDGVEVHNAKTK
PREEQYNSTYRWSVLTVLHQDWLNGKEYKCKVSNKALGAPIEKTISKAKGQPREPQVYTLPPSRDELTKN
QVSLYCLVKGFYPSDIAVEWESNGQPENNYKTTPPVLDSDGSFFLYSKLTVDKSRWQQGNVFSCSVMHEA
LHNHYTQKSLSLSPGKGGSGGSGGSGGSGGSGGSGGSGGSGGSGGSGCDLPQTHSLGSRRTLMLLAQ
MRKISLFSCLKDRHDFGFPQEEFGNQFQKAETIPVLHEMIQQIFNLFSTKDSSAAWDETLLDKFYTELYQQL
NDLEACVIQGVGVAETPLMKEDSILAVRKYFQRITLYLKEKKYSPCAWEVVRAEIMASFSLSTNLQESLRSK
E
Fc2-10*GGS-IFNa2A_T106E-R149A(P-1303)
(SEQ ID NO: 1465)
DKTHTCPPCPAPEAAGGPSVFLFPPKPKDTLMISRTPEVTCVVVDVSHEDPEVKFNWYVDGVEVHNAKTK
PREEQYNSTYRWSVLTVLHQDWLNGKEYKCKVSNKALGAPIEKTISKAKGQPREPQVYTLPPSRDELTKN
QVSLYCLVKGFYPSDIAVEWESNGQPENNYKTTPPVLDSDGSFFLYSKLTVDKSRWQQGNVFSCSVMHEA
LHNHYTQKSLSLSPGKGGSGGSGGSGGSGGSGGSGGSGGSGGSGGSGCDLPQTHSLGSRRTLMLLAQ
MRKISLFSCLKDRHDFGFPQEEFGNQFQKAETIPVLHEMIQQIFNLFSTKDSSAAWDETLLDKFYTELYQQL
NDLEACVIQGVGVEETPLMKEDSILAVRKYFQRITLYLKEKKYSPCAWEVVRAEIMASFSLSTNLQESLRSK
E
Fc2-10*GGS-IFNa2B_R149A(P-1304)
(SEQ ID NO: 1466)
DKTHTCPPCPAPEAAGGPSVFLFPPKPKDTLMISRTPEVTCVVVDVSHEDPEVKFNWYVDGVEVHNAKTK
PREEQYNSTYRWSVLTVLHQDWLNGKEYKCKVSNKALGAPIEKTISKAKGQPREPQVYTLPPSRDELTKN
QVSLYCLVKGFYPSDIAVEWESNGQPENNYKTTPPVLDSDGSFFLYSKLTVDKSRWQQGNVFSCSVMHEA
LHNHYTQKSLSLSPGKGGSGGSGGSGGSGGSGGSGGSGGSGGSGGSGCDLPQTHSLGSRRTLMLLAQ
MRRISLFSCLKDRHDFGFPQEEFGNQFQKAETIPVLHEMIQQIFNLFSTKDSSAAWDETLLDKFYTELYQQL
NDLEACVIQGVGVTETPLMKEDSILAVRKYFQRITLYLKEKKYSPCAWEVVRAEIMASFSLSTNLQESLRSKE
Fc2-10*GGS-IFNa2B_T106A-R149A(P-1305)
(SEQ ID NO: 1467)
DKTHTCPPCPAPEAAGGPSVFLFPPKPKDTLMISRTPEVTCVVVDVSHEDPEVKFNWYVDGVEVHNAKTK
PREEQYNSTYRWSVLTVLHQDWLNGKEYKCKVSNKALGAPIEKTISKAKGQPREPQVYTLPPSRDELTKN
QVSLYCLVKGFYPSDIAVEWESNGQPENNYKTTPPVLDSDGSFFLYSKLTVDKSRWQQGNVFSCSVMHEA
LHNHYTQKSLSLSPGKGGSGGSGGSGGSGGSGGSGGSGGSGGSGGSGCDLPQTHSLGSRRTLMLLAQ
MRRISLFSCLKDRHDFGFPQEEFGNQFQKAETIPVLHEMIQQIFNLFSTKDSSAAWDETLLDKFYTELYQQL
NDLEACVIQGVGVAETPLMKEDSILAVRKYFQRITLYLKEKKYSPCAWEVVRAEIMASFSLSTNLQESLRSK
E
Fc2-10*GGS-IFNa2B_T106E-R149A(P-1306)
(SEQ ID NO: 1468)
DKTHTCPPCPAPEAAGGPSVFLFPPKPKDTLMISRTPEVTCVVVDVSHEDPEVKFNWYVDGVEVHNAKTK
PREEQYNSTYRWSVLTVLHQDWLNGKEYKCKVSNKALGAPIEKTISKAKGQPREPQVYTLPPSRDELTKN
QVSLYCLVKGFYPSDIAVEWESNGQPENNYKTTPPVLDSDGSFFLYSKLTVDKSRWQQGNVFSCSVMHEA
LHNHYTQKSLSLSPGKGGSGGSGGSGGSGGSGGSGGSGGSGGSGGSGCDLPQTHSLGSRRTLMLLAQ
MRRISLFSCLKDRHDFGFPQEEFGNQFQKAETIPVLHEMIQQIFNLFSTKDSSAAWDETLLDKFYTELYQQL
NDLEACVIQGVGVEETPLMKEDSILAVRKYFQRITLYLKEKKYSPCAWEVVRAEIMASFSLSTNLQESLRSK
E

### Production and Purification of IFNα2 Variants

[1088] R1CHCL50-5*GGS-Fc1 or 3LEC89-5*GGS-Fc1 were combined with the R149A mutant of IFNα2A or IFNα2B with or without mutated O-glycosylation site (T106, T106A or T106E) fused to Fc2 via a 10*GGS linker resulting in heterodimeric ActaFerons (AFNs) with a configuration outlined in FIG. 7B. Combinations were transiently expressed in the ExpiCHO expression system (Thermo Fisher) according to the manufacturer's guidelines. Recombinant proteins were purified from the supernatant using the Pierce Protein A spin plates (Thermo Fisher) according to the manufacturer's guidelines. Production-levels of different combinations were comparable and varied between 170 and 420 μg/ml. The loss of O-glycosylation was confirmed using SDS-PAGE.

### Biological Activity on HL116 Reporter Cell-Lines

[1089] Biological activities of the alternative IFNα2 mutants were measured as described in previous Examples. In brief, parental HL116 and the derived HL116-hClec9A were stimulated for six hours with a serial dilution of Fc-AFNs. Luciferase activity was measured and plotted in FIG. 29 and summarized in Table 9. Data suggest that AFNs based on IFNa2B are only slightly more potent than those with IFNa2A, while mutation of the IFNα2 O-glycosylation site T106 (to A or E) does not affect signaling.

TABLE 9
Effect of IFNa2 mutations on biological
activity. Summary of EC₅₀ (ng/ml)
values of the biological activity
measured in FIG. 29

| | EC₅₀ (ng/ml) | | | |
|---|---|---|---|---|
| | 3LEC89 | | R1CHCL50 | |
| | IFNa2A | IFNa2B | IFNa2A | IFNa2B |
| wild type | 0.98 | 0.58 | 1.68 | 1.07 |
| T106A | 0.58 | 0.37 | 1.49 | 0.61 |
| T106E | 1.04 | 0.38 | 1.58 | 1.18 |

### Affinity for IFNAR2

[1090] Here the effect of the IFNa2 mutations on affinity for its receptor IFNAR2 in BLI was evaluated on an Octet instrument. R1CHCL50-based Fc variants with sequence variations in IFNa2 were loaded onto Protein A bio-sensors (Pall) and subsequently incubated with a serial dilution recombinant IFNAR2 (SinoBiological). Shifts in the interference pattern were used to quantify the association and dissociation rates and thus the affinity. These experiments showed that the mutations don't have a major impact on the affinity for IFNAR2 (data not shown).

### Example 9: Additional Fc Formats

[1091] In previous Examples, a heteromeric Fc format was used in which the VHH (R1CHCL50 or 3LEC89) is cloned N- and the IFNa2 mutant C-terminally of the Fc portion. In this Example, formats with VHH and IFNa2 mutant on the same side (N- or C-terminally) of the molecule were generated. Resulting AFNs were tested for biological activity (HL116-hClec9A reporter) and hClec9A affinity (bio-layer interferometry (BLI) technology on an Octet instrument).

### Constructs:

3LEC89-20*GGS-Fc1(P-958)
(SEQ ID NO: 1469)
QVQLQESGGGLVQPGGSLRLSCAASGRIFSVNAMGVVYRQAPGKQRELVAAITNQGAPTYADSVKGRFTIS
RDNAGNTVYLQMNSLRPEDTAVYYCKAFTRGDDYWGQGTQVTVSSGGSGGSGGSGGSGGSGGSGGSG
GSGGSGGSGGSGGSGGSGGSGGSGGSGGSGGSGGSGGSDKTHTCPPCPAPEAAGGPSVFLFPPKPKD
TLMISRTPEVTCWVDVSHEDPEVKFNVVYVDGVEVHNAKTKPREEQYNSTYRVVSVLTVLHQDWLNGKEY
KCKVSNKALGAPIEKTISKAKGQPREPQVYTLPPSRDELTKNQVSLTCLVKGFYPSDIAVEWESNGQPENN
YKTTPPVLDSDGSFFLTSKLTVDKSRWQQGNVFSCSVMHEALHNHYTQKSLSLSPGK
Fc2-20*GGS-IFNa2_R149A(P-959)
(SEQ ID NO: 1470)
DKTHTCPPCPAPEAAGGPSVFLFPPKPKDTLMISRTPEVTCVVVDVSHEDPEVKFNWYVDGVEVHNAKTK
PREEQYNSTYRWSVLTVLHQDWLNGKEYKCKVSNKALGAPIEKTISKAKGQPREPQVYTLPPSRDELTKN
QVSLYCLVKGFYPSDIAVEWESNGQPENNYKTTPPVLDSDGSFFLYSKLTVDKSRWQQGNVFSCSVMHEA
LHNHYTQKSLSLSPGKGGSGGSGGSGGSGGSGGSGGSGGSGGSGGSGGSGGSGGSGGSGGSGGSG
GSGGSGGSGGSGCDLPQTHSLGSRRTLMLLAQMRKISLFSCLKDRHDFGFPQEEFGNQFQKAETIPVLHE
MIQQIFNLFSTKDSSAAWDETLLDKFYTELYQQLNDLEACVIQGVGVTETPLMKEDSILAVRKYFQRITLYLK
EKKYSPCAWEVVRAEIMASFSLSTNLQESLRSKE
R1CHCL50_opt4-20*GGS-Fc1(P-1213)
(SEQ ID NO: 1471)
DVQLVESGGGLVQPGGSLRLSCAASGSFSSINVMGVVYRQAPGKERELVARITNLGLPNYADSVKGRFTIS
RDNSKNTVYLQMNSLRPEDTAVYYCYLVALKAEYWGQGTLVTVSSGGSGGSGGSGGSGGSGGSGGSG
GSGGSGGSGGSGGSGGSGGSGGSGGSGGSGGSGGSGGSDKTHTCPPCPAPEAAGGPSVFLFPPKPKD
TLMISRTPEVTCVVVDVSHEDPEVKFNVVYVDGVEVHNAKTKPREEQYNSTYRVVSVLTVLHQDWLNGKEY
KCKVSNKALGAPIEKTISKAKGQPREPQVYTLPPSRDELTKNQVSLTCLVKGFYPSDIAVEWESNGQPENN
YKTTPPVLDSDGSFFLTSKLTVDKSRWQQGNVFSCSVMHEALHNHYTQKSLSLSPGK
IFNa2_R149A-20*GGS-Fc2(P-1214)
(SEQ ID NO: 1472)
CDLPQTHSLGSRRTLMLLAQMRKISLFSCLKDRHDFGFPQEEFGNQFQKAETIPVLHEMIQQIFNLFSTKDS
SAAWDETLLDKFYTELYQQLNDLEACVIQGVGVTETPLMKEDSILAVRKYFQRITLYLKEKKYSPCAWEVVR
AEIMASFSLSTNLQESLRSKEGGSGGSGGSGGSGGSGGSGGSGGSGGSGGSGGSGGSGGSGGSGGS
GGSGGSGGSGGSGGSDKTHTCPPCPAPEAAGGPSVFLFPPKPKDTLMISRTPEVTCVVVDVSHEDPEVKF
NVVYVDGVEVHNAKTKPREEQYNSTYRVVSVLTVLHQDWLNGKEYKCKVSNKALGAPIEKTISKAKGQPRE
PQVYTLPPSRDELTKNQVSLYCLVKGFYPSDIAVEWESNGQPENNYKTTPPVLDSDGSFFLYSKLTVDKSR
WQQGNVFSCSVMHEALHNHYTQKSLSLSPGK
Fc1-20*GGS-R1CHCL50_opt4(P-1215)
(SEQ ID NO: 1473)
DKTHTCPPCPAPEAAGGPSVFLFPPKPKDTLMISRTPEVTCVVVDVSHEDPEVKFNWYVDGVEVHNAKTK
PREEQYNSTYRWSVLTVLHQDWLNGKEYKCKVSNKALGAPIEKTISKAKGQPREPQVYTLPPSRDELTKN
QVSLTCLVKGFYPSDIAVEWESNGQPENNYKTTPPVLDSDGSFFLTSKLTVDKSRWQQGNVFSCSVMHEA
LHNHYTQKSLSLSPGKGGSGGSGGSGGSGGSGGSGGSGGSGGSGGSGGSGGSGGSGGSGGSGGSG
GSGGSGGSGGSDVQLVESGGGLVQPGGSLRLSCAASGSFSSINVMGWYRQAPGKERELVARITNLGLPN
YADSVKGRFTISRDNSKNTVYLQMNSLRPEDTAVYYCYLVALKAEYWGQGTLVTVSS
Fc1-20*GGS-3LEC89_opt4(P-1216)
(SEQ ID NO: 1474)
DKTHTCPPCPAPEAAGGPSVFLFPPKPKDTLMISRTPEVTCVVVDVSHEDPEVKFNWYVDGVEVHNAKTK
PREEQYNSTYRWSVLTVLHQDWLNGKEYKCKVSNKALGAPIEKTISKAKGQPREPQVYTLPPSRDELTKN
QVSLTCLVKGFYPSDIAVEWESNGQPENNYKTTPPVLDSDGSFFLTSKLTVDKSRWQQGNVFSCSVMHEA
LHNHYTQKSLSLSPGKGGSGGSGGSGGSGGSGGSGGSGGSGGSGGSGGSGGSGGSGGSGGSGGSG
GSGGSGGSGGSDVQLVESGGGLVQPGGSLRLSCAASGRIFSVNAMGWYRQAPGKQRELVAAITNQGAP
TYADSVKGRFTISRDNSKNTVYLQMNSLRPEDTAVYYCKAFTRGDDYWGQGTLVTVSS

### Production and Purification of Different Fc Formats

[1093] Hole (with the VHH C- or N-terminal) and knob (with the mutant IFNα2 C- or N-terminal) sequence were combined as follows:
[1094] 3LEC89-20*GGS-Fc1+Fc2-20*GGS-IFNα2_R149A (configuration: FIG. 7B);
[1095] R1CHCL50-20*GGS-Fc1+Fc2-20*GGS-IFNα2_R149A (configuration: FIG. 7B);
[1096] 3LEC89-20*GGS-Fc1+IFNα2_R149A-20*GGS-Fc2 (configuration: FIG. 7C);
[1097] R1CHCL50-20*GGS-Fc1+IFNa2_R149A-20*GGS-Fc2 (configuration: FIG. 7C);
[1098] Fc1-20*GGS-3LEC89+Fc2-20*GGS-IFNα2_R149A (configuration: FIG. 7D);
[1099] Fc1-20*GGS-R1CHCL50+Fc2-20*GGS-IFNα2_R149A (configuration: FIG. 7D);

[1100] These sequences were produced in ExpiCHO cells. Recombinant proteins were purified from the supernatant using the Pierce Protein A spin plates (Thermo Fisher) according to the manufacturer's guidelines. Yields of different Fc formats were comparable and ranged from 100 to 250 μg/ml.

### Biological Activity on HL116 Reporter Cell-Lines

[1101] Biological activities of the different Fc-formats were measured as described in previous Examples. In brief, parental HL116 and the derived HL116-hClec9A were stimulated for 6 hours with a serial dilution of Fc-AFNs. Luciferase activity was measured and plotted in FIG. 30 and summarized in Table 10. Data suggest that Fc formats with both VHH and IFNα2_R149A cloned C-terminally are somewhat less active on targeted cells compared to the other two formats. Of note, no signaling was observed in the untargeted cells (parental HL116) for any of the constructs and hence all constructs retain a very high targeting index.

TABLE 10
Biological activity of different
Fc formats. Summary of EC₅₀ (ng/ml)
values of the biological activity
measured in FIG. 30.

| | EC₅₀ (ng/ml) | |
|---|---|---|
| | R1CHCL50 | 3LEC89 |
| VHH-20*GGS-Fc1 + Fc2- | 0.63 | 0.79 |
| 20*GGS-IFNa2_R149A | | |
| VHH-20*GGS-Fc1 + | 0.66 | 0.53 |
| IFNa2_R149A-20*GGS-Fc2 | | |
| Fc1-20*GGS-VHH + Fc2- | 1.28 | 1.47 |
| 20*GGS-IFNa2_R149A | | |

Affinity for hClec9A

[1102] Affinity of different Fc formats for human Clec9A was determined as described in Example 1. Data, summarized in Table 11, illustrate that differences in association and dissociation (and thus KD) between the different formats are only marginal.

TABLE 11
Affinity of different Fc formats for Clec9A

| | KD (M) | KD Error | kon (1/Ms) | kon Error | kdis (1/s) | kdis Error |
|---|---|---|---|---|---|---|
| 3LEC89-Fc + | 1.56E−09 | 1.17E−11 | 3.75E+05 | 1.22E+03 | 5.85E−04 | 3.92E−06 |
| Fc-IFN | | | | | | |
| R1CHCL50- | 2.55E−09 | 2.41E−11 | 3.12E+05 | 1.70E+03 | 7.96E−04 | 6.13E−06 |
| Fc + Fc-IFN | | | | | | |
| 3LEC89-Fc + | 1.61E−09 | 1.72E−11 | 2.85E+05 | 1.13E+03 | 4.61E−04 | 4.55E−06 |
| IFN-Fc | | | | | | |
| R1CHCL50- | 2.15E−09 | 2.39E−11 | 2.84E+05 | 1.54E+03 | 6.09E−04 | 5.92E−06 |
| Fc + IFN-Fc | | | | | | |
| Fc-3LEC89 + | 3.23E−09 | 2.77E−11 | 2.85E+05 | 1.55E+03 | 9.19E−04 | 6.13E−06 |
| Fc-IFN | | | | | | |
| Fc-R1CHCL50 + | 1.83E−09 | 1.48E−11 | 2.96E+05 | 1.02E+03 | 5.42E−04 | 3.95E−06 |
| Fc-IFN | | | | | | |

### Example 10: Comparison of Two Different Knob-in-Hole (KiH) Mutations

[1103] Here, two variants of the knob-in-hole technology: Ridgway (as used in previous Examples) and Merchant were compared. Sequences are referred to as Fc1 and Fc2 (Ridgway hole and knob, respectively) and Fc3 and Fc4 (Merchant hole and knob, respectively). Fc constructs, with a configuration outlined in FIG. 7B, with both KiHs were made based on VHHs R1CHCL50 and 3LEC89.
[1104] Fc1: Ridgway hole: hIgG1 Fc_L234A_L235A_P329G_Y407T
[1105] Fc2: Ridgway knob: hIgG1 Fc_L234A_L235A_P329G_T366Y
[1106] Fc3: Merchant hole: hIgG1 Fc_L234A_L235A_K322Q_Y349C_T366S_L368A_Y407V
[1107] Fc4: Merchant knob: hIgG1 Fc_L234A_L235A_K322Q_S354C_T366W

### Constructs:

3LEC89-20*GGS-Fc1(P-958)
(SEQ ID NO: 1475)
QVQLQESGGGLVQPGGSLRLSCAASGRIFSVNAMGVVYRQAPGKQRELVAAITNQGAPTYADSVKGRFTIS
RDNAGNTVYLQMNSLRPEDTAVYYCKAFTRGDDYWGQGTQVTVSSGGSGGSGGSGGSGGSGGSGGSG
GSGGSGGSGGSGGSGGSGGSGGSGGSGGSGGSGGSGGSDKTHTCPPCPAPEAAGGPSVFLFPPKPKD
TLMISRTPEVTCWVDVSHEDPEVKFNVVYVDGVEVHNAKTKPREEQYNSTYRVVSVLTVLHQDWLNGKEY
KCKVSNKALGAPIEKTISKAKGQPREPQVYTLPPSRDELTKNQVSLTCLVKGFYPSDIAVEWESNGQPENN
YKTTPPVLDSDGSFFLTSKLTVDKSRWQQGNVFSCSVMHEALHNHYTQKSLSLSPGK
Fc2-20*GGS-IFNa2_R149A(P-959)
(SEQ ID NO: 1476)
DKTHTCPPCPAPEAAGGPSVFLFPPKPKDTLMISRTPEVTCVVVDVSHEDPEVKFNWYVDGVEVHNAKTK
PREEQYNSTYRWSVLTVLHQDWLNGKEYKCKVSNKALGAPIEKTISKAKGQPREPQVYTLPPSRDELTKN
QVSLYCLVKGFYPSDIAVEWESNGQPENNYKTTPPVLDSDGSFFLYSKLTVDKSRWQQGNVFSCSVMHEA
LHNHYTQKSLSLSPGKGGSGGSGGSGGSGGSGGSGGSGGSGGSGGSGGSGGSGGSGGSGGSGGSG
GSGGSGGSGGSGCDLPQTHSLGSRRTLMLLAQMRKISLFSCLKDRHDFGFPQEEFGNQFQKAETIPVLHE
MIQQIFNLFSTKDSSAAWDETLLDKFYTELYQQLNDLEACVIQGVGVTETPLMKEDSILAVRKYFQRITLYLK
EKKYSPCAWEVVRAEIMASFSLSTNLQESLRSKE
R1CHCL50_opt4-5*GGS-Fc1(P-1105)
(SEQ ID NO: 1477)
DVQLVESGGGLVQPGGSLRLSCAASGSFSSINVMGVVYRQAPGKERELVARITNLGLPNYADSVKGRFTIS
RDNSKNTVYLQMNSLRPEDTAVYYCYLVALKAEYWGQGTLVTVSSGGSGGSGGSGGSGGSDKTHTCPP
CPAPEAAGGPSVFLFPPKPKDTLMISRTPEVTCVVVDVSHEDPEVKFNVVYVDGVEVHNAKTKPREEQYNS
TYRVVSVLTVLHQDWLNGKEYKCKVSNKALGAPIEKTISKAKGQPREPQVYTLPPSRDELTKNQVSLTCLV
KGFYPSDIAVEWESNGQPENNYKTTPPVLDSDGSFFLTSKLTVDKSRWQQGNVFSCSVMHEALHNHYTQ
KSLSLSPGK
3LEC89-20*GGS-Fc3(P-1411)
(SEQ ID NO: 1478)
QLQESGGGLVQPGGSLRLSCAASGRIFSVNAMGWYRQAPGKQRELVAAITNQGAPTYADSVKGRFTISRD
NAGNTVYLQMNSLRPEDTAVYYCKAFTRGDDYWGQGTQVTVSSGGSGGSGGSGGSGGSGGSGGSGGS
GGSGGSGGSGGSGGSGGSGGSGGSGGSGGSGGSGGSDKTHTCPPCPAPEAAGGPSVFLFPPKPKDTL
MISRTPEVTCWVDVSHEDPEVKFNVVYVDGVEVHNAKTKPREEQYNSTYRVVSVLTVLHQDWLNGKEYKC
QVSNKALPAPIEKTISKAKGQPREPQVCTLPPSRDELTKNQVSLSCAVKGFYPSDIAVEWESNGQPENNYK
TTPPVLDSDGSFFLVSKLTVDKSRWQQGNVFSCSVMHEALHNHYTQKSLSLSPGK
Fc4-20*GGS-IFNa2_R149A(P-1414)
(SEQ ID NO: 1479)
DKTHTCPPCPAPEAAGGPSVFLFPPKPKDTLMISRTPEVTCVVVDVSHEDPEVKFNWYVDGVEVHNAKTK
PREEQYNSTYRWSVLTVLHQDWLNGKEYKCQVSNKALPAPIEKTISKAKGQPREPQVYTLPPCRDELTKN
QVSLWCLVKGFYPSDIAVEWESNGQPENNYKTTPPVLDSDGSFFLYSKLTVDKSRWQQGNVFSCSVMHE
ALHNHYTQKSLSLSPGKGGSGGSGGSGGSGGSGGSGGSGGSGGSGGSGGSGGSGGSGGSGGSGGS
GGSGGSGGSGGSCDLPQTHSLGSRRTLMLLAQMRKISLFSCLKDRHDFGFPQEEFGNQFQKAETIPVLHE
MIQQIFNLFSTKDSSAAWDETLLDKFYTELYQQLNDLEACVIQGVGVEETPLMKEDSILAVRKYFQRITLYLK
EKKYSPCAWEVVRAEIMASFSLSTNLQESLRSKE
R1CHCL50-Fc3-20*GGS-IFNa2_R149A(P-1451)
(SEQ ID NO: 1480)
QVQLVESGGGLVHPGGSLRLSCAASGSFSSINVMGVVYRQAPGKERELVARITNLGLPNYADSVTGRFTIS
RDNAKNTVYLQMNSLKPEDTAVYYCYLVALKAEYWGQGTQVTVSSGGSGGSGGSGGSGGSGGSGGSG
GSGGSGGSGGSGGSGGSGGSGGSGGSGGSGGSGGSGGSDKTHTCPPCPAPEAAGGPSVFLFPPKPKD
TLMISRTPEVTCVVVDVSHEDPEVKFNVVYVDGVEVHNAKTKPREEQYNSTYRVVSVLTVLHQDWLNGKEY
KCQVSNKALPAPIEKTISKAKGQPREPQVCTLPPSRDELTKNQVSLSCAVKGFYPSDIAVEWESNGQPENN
YKTTPPVLDSDGSFFLVSKLTVDKSRWQQGNVFSCSVMHEALHNHYTQKSLSLSPGK

### Production and Purification of Different Fc Formats

[1109] Combinations of knob and hole constructs were produced in ExpiCHO cells as described above. Recombinant proteins were purified from the supernatant using the Pierce Protein A spin plates (Thermo Fisher) according to the manufacturer's guidelines. Use of different knob in holes (KiH's) did not have a major influence on production levels, which varied from 250 to 400 μg/ml.

### Biological Activity on HL116 Reporter Cell-Lines

[1110] Biological activities of the different KiH Fc AFNs were measured as described in previous Examples. In brief, parental HL116 and the derived HL116-hClec9A were stimulated for six hours with a serial dilution of Fc-AFNs. Luciferase activity was measured and plotted in FIG. 31. Data suggest that the different KiH variations do not affect biological activity in targeted cells (i.e. Clec9A expressing) significantly.

### Example 11: Mono- Vs. Bi-Valent Targeted Fc Formats

[1111] In this Example, the biological activity and relative binding of a mono- and bivalent targeted (i.e. molecules with one or two VHHs, respectively) format of R1CHCL50 Fc AFN was compared.

### Constructs:

R1CHCL50-20*GGS-Fc3(P-1451)
(SEQ ID NO: 1481)
QVQLVESGGGLVHPGGSLRLSCAASGSFSSINVMGVVYRQAPGKERELVARITNLGLPNYADSVTGRFTIS
RDNAKNTVYLQMNSLKPEDTAVYYCYLVALKAEYWGQGTQVTVSSGGSGGSGGSGGSGGSGGSGGSG
GSGGSGGSGGSGGSGGSGGSGGSGGSGGSGGSGGSGGSDKTHTCPPCPAPEAAGGPSVFLFPPKPKD
TLMISRTPEVTCVVVDVSHEDPEVKFNVVYVDGVEVHNAKTKPREEQYNSTYRVVSVLTVLHQDWLNGKEY
KCQVSNKALPAPIEKTISKAKGQPREPQVCTLPPSRDELTKNQVSLSCAVKGFYPSDIAVEWESNGQPENN
YKTTPPVLDSDGSFFLVSKLTVDKSRWQQGNVFSCSVMHEALHNHYTQKSLSLSPGK
Fc4-20*GGS-IFNa2_R149A(P-1414)
(SEQ ID NO: 1482)
DKTHTCPPCPAPEAAGGPSVFLFPPKPKDTLMISRTPEVTCVVVDVSHEDPEVKFNWYVDGVEVHNAKTK
PREEQYNSTYRWSVLTVLHQDWLNGKEYKCQVSNKALPAPIEKTISKAKGQPREPQVYTLPPCRDELTKN
QVSLWCLVKGFYPSDIAVEWESNGQPENNYKTTPPVLDSDGSFFLYSKLTVDKSRWQQGNVFSCSVMHE
ALHNHYTQKSLSLSPGKGGSGGSGGSGGSGGSGGSGGSGGSGGSGGSGGSGGSGGSGGSGGSGGS
GGSGGSGGSGGSCDLPQTHSLGSRRTLMLLAQMRKISLFSCLKDRHDFGFPQEEFGNQFQKAETIPVLHE
MIQQIFNLFSTKDSSAAWDETLLDKFYTELYQQLNDLEACVIQGVGVEETPLMKEDSILAVRKYFQRITLYLK
EKKYSPCAWEVVRAEIMASFSLSTNLQESLRSKE
R1CHCL50-20*GGS-Fc4-20*GGS-IFNa2_R149A(P-1459)
(SEQ ID NO: 1483)
QVQLVESGGGLVHPGGSLRLSCAASGSFSSINVMGVVYRQAPGKERELVARITNLGLPNYADSVTGRFTIS
RDNAKNTVYLQMNSLKPEDTAVYYCYLVALKAEYWGQGTQVTVSSGGSGGSGGSGGSGGSGGSGGSG
GSGGSGGSGGSGGSGGSGGSGGSGGSGGSGGSGGSGGSDKTHTCPPCPAPEAAGGPSVFLFPPKPKD
TLMISRTPEVTCVVVDVSHEDPEVKFNVVYVDGVEVHNAKTKPREEQYNSTYRVVSVLTVLHQDWLNGKEY
KCQVSNKALPAPIEKTISKAKGQPREPQVYTLPPCRDELTKNQVSLWCLVKGFYPSDIAVEWESNGQPENN
YKTTPPVLDSDGSFFLYSKLTVDKSRWQQGNVFSCSVMHEALHNHYTQKSLSLSPGKGGSGGSGGSGGS
GGSGGSGGSGGSGGSGGSGGSGGSGGSGGSGGSGGSGGSGGSGGSGGSCDLPQTHSLGSRRTLMLL
AQMRKISLFSCLKDRHDFGFPQEEFGNQFQKAETIPVLHEMIQQIFNLFSTKDSSAAWDETLLDKFYTELYQ
QLNDLEACVIQGVGVEETPLMKEDSILAVRKYFQRITLYLKEKKYSPCAWEVVRAEIMASFSLSTNLQESLR
SKE

### Production and Purification of Different Fc Formats

[1113] A mono- (schematic: FIG. 7B) or bivalent (schematic: FIG. 16A) targeted variants of R1CHCL50 Fc AFN was made by combining the corresponding knob and a hole constructs and express them in ExpiCHO cells as described above. Recombinant proteins were purified from the supernatant using the Pierce Protein A spin plates (Thermo Fisher) according to the manufacturer's guidelines.

### Biological Activity on HL116 Reporter Cell-Lines

[1114] Biological activities of mono- and bivalent targeted Fc AFNs were measured as described in previous Examples. In brief, parental HL116 and the derived HL116-hClec9A were stimulated for six hours with a serial dilution of Fc-AFNs. Luciferase activity was measured and plotted in FIG. 32. Data show that the bivalent targeted AFN is approximately five-fold more active on target cells (HL116-hClec9A). Signaling in non-target cells (parental H L116 cells) was comparable for both variants.

### Relative Affinity in FACS

[1115] To measure relative affinities for Clec9A of the mono- and bivalent targeted Fc AFNs, HL116-hClec9A cells were incubated with a serial dilution of AFN. Binding was detected by subsequent incubation with an FITC-coupled anti-human secondary Ab, measured on a MACSQuant X instrument (Miltenyi Biotech) and analysed using the FlowLogic software (Miltenyi Biotech). Data in FIG. 33 illustrates that the bivalent targeted AFN has an about 15-fold lower binding EC50 when compared to the monovalent variant.

### Example 12: Variant Bivalent Targeted Fc Formats

[1116] In this Example, additional bivalent but heterodimeric variant Fc formats were generated and the biological activity was tested.

### Constructs:

R1CHCL50-20*GGS-R1CHCL50-20*GGS-Fc3
(SEQ ID NO: 1484)
QVQLVESGGGLVHPGGSLRLSCAASGSFSSINVMGVVYRQAPGKERELVARITNLGLPNYADSVTGRFTIS
RDNAKNTVYLQMNSLKPEDTAVYYCYLVALKAEYWGQGTQVTVSSGGSGGSGGSGGSGGSGGSGGSG
GSGGSGGSGGSGGSGGSGGSGGSGGSGGSGGSGGSGGSQVQLVESGGGLVHPGGSLRLSCAASGSF
SSINVMGVVYRQAPGKERELVARITNLGLPNYADSVTGRFTISRDNAKNTVYLQMNSLKPEDTAVYYCYLVA
LKAEYWGQGTQVTVSSGGSGGSGGSGGSGGSGGSGGSGGSGGSGGSGGSGGSGGSGGSGGSGGSG
GSGGSGGSGGSDKTHTCPPCPAPEAAGGPSVFLFPPKPKDTLMISRTPEVTCVVVDVSHEDPEVKFNVVYV
DGVEVHNAKTKPREEQYNSTYRVVSVLTVLHQDWLNGKEYKCQVSNKALPAPIEKTISKAKGQPREPQVC
TLPPSRDELTKNQVSLSCAVKGFYPSDIAVEWESNGQPENNYKTTPPVLDSDGSFFLVSKLTVDKSRWQQ
GNVFSCSVMHEALHNHYTQKSLSLSPGK
Fc4-20*GGS-IFNa2_R149A(P-1414)
(SEQ ID NO: 1485)
DKTHTCPPCPAPEAAGGPSVFLFPPKPKDTLMISRTPEVTCVWDVSHEDPEVKFNWYVDGVEVHNAKTK
PREEQYNSTYRWSVLTVLHQDWLNGKEYKCQVSNKALPAPIEKTISKAKGQPREPQVYTLPPCRDELTKN
QVSLWCLVKGFYPSDIAVEWESNGQPENNYKTTPPVLDSDGSFFLYSKLTVDKSRWQQGNVFSCSVMHE
ALHNHYTQKSLSLSPGKGGSGGSGGSGGSGGSGGSGGSGGSGGSGGSGGSGGSGGSGGSGGSGGS
GGSGGSGGSGGSCDLPQTHSLGSRRTLMLLAQMRKISLFSCLKDRHDFGFPQEEFGNQFQKAETIPVLHE
MIQQIFNLFSTKDSSAAWDETLLDKFYTELYQQLNDLEACVIQGVGVEETPLMKEDSILAVRKYFQRITLYLK
EKKYSPCAWEVVRAEIMASFSLSTNLQESLRSKE

### Production and Purification of Different Fc Formats

[1118] The bivalent (schematic: FIG. 8B) targeted variant of our R1CHCL50 Fc AFN was made by combining the corresponding knob and a hole constructs and expressing them in ExpiCHO cells as described above. Recombinant proteins were purified from the supernatant using the Pierce Protein A spin plates (Thermo Fisher) according to the manufacturer's guidelines.

### Biological Activity on HL116 Reporter Cell-Lines

[1119] The biological activity of the bivalent targeted Fc AFNs was measured as described in previous Examples. In brief, parental HL116 and the derived HL116-hClec9A were stimulated for six hours with a serial dilution of Fc-AFNs.

### Example 13: Pharmacokinetic Study in Mouse

[1120] To evaluate the pharmacokinetic behavior of the Fc-based AFNs, 4 different molecules were selected all carrying the K322Q mutation:
[1121] R1CHCL50(opt)4 combined with IFNα2_R149A using a Ridgway KiH Fc with LALA-K322Q mutation (combining construct 1 and 2)
[1122] R1CHCL50(opt)4 combined with IFNα2_R149A-T106E using a Ridgway KiH Fc with LALA-K322Q mutation (combining construct 1 and 3)
[1123] R1CHCL50(opt)4 combined with IFNα2_R149A using a Merchant KiH Fc with LALA-K322Q mutation (combining construct 4 and 5)
[1124] R1CHCL50(opt)4 combined with IFNα2_R149A-T106E using a Merchant KiH Fc with LALA-K322Q mutation (combining construct 5 and 6)

### Constructs:

1. R1CHCL50(opt4)-5*GGS-Fc1 (P329; K322Q) (P-1477)
(SEQ ID NO: 1486)
DVQLVESGGGLVQPGGSLRLSCAASGSFSSINVMGWYRQAPGKERELVARITNLGLPNYADSVKGRFTIS
RDNSKNTVYLQMNSLRPEDTAVYYCYLVALKAEYWGQGTLVTVSSGGSGGSGGSGGSGGSDKTHTCPP
CPAPEAAGGPSVFLFPPKPKDTLMISRTPEVTCVVVDVSHEDPEVKFNWYVDGVEVHNAKTKPREEQYNS
TYRVVSVLTVLHQDWLNGKEYKCQVSNKALPAPIEKTISKAKGQPREPQVYTLPPSRDELTKNQVSLTCLV
KGFYPSDIAVEWESNGQPENNYKTTPPVLDSDGSFFLTSKLTVDKSRWQQGNVFSCSVMHEALHNHYTQ
KSLSLSPGK
2. Fc2 (P329; K322Q)-10*GGS-IFNa2_R149A (P-1481)
(SEQ ID NO: 1487)
DKTHTCPPCPAPEAAGGPSVFLFPPKPKDTLMISRTPEVTCVVVDVSHEDPEVKFNWYVDGVEVHNAKTK
PREEQYNSTYRVVSVLTVLHQDWLNGKEYKCQVSNKALPAPIEKTISKAKGQPREPQVYTLPPSRDELTKN
QVSLYCLVKGFYPSDIAVEWESNGQPENNYKTTPPVLDSDGSFFLYSKLTVDKSRWQQGNVFSCSVMHEA
LHNHYTQKSLSLSPGKGGSGGSGGSGGSGGSGGSGGSGGSGGSGGSGCDLPQTHSLGSRRTLMLLAQ
MRRISLFSCLKDRHDFGFPQEEFGNQFQKAETIPVLHEMIQQIFNLFSTKDSSAAWDETLLDKFYTELYQQL
NDLEACVIQGVGVTETPLMKEDSILAVRKYFQRITLYLKEKKYSPCAWEVVRAEIMASFSLSTNLQESLRSKE
3. Fc2 (P329; K322Q)-10*GGS-IFNa2_R149A_T106E (P-1482)
(SEQ ID NO: 1488)
DKTHTCPPCPAPEAAGGPSVFLFPPKPKDTLMISRTPEVTCVVVDVSHEDPEVKFNWYVDGVEVHNAKTK
PREEQYNSTYRVVSVLTVLHQDWLNGKEYKCQVSNKALPAPIEKTISKAKGQPREPQVYTLPPSRDELTKN
QVSLYCLVKGFYPSDIAVEWESNGQPENNYKTTPPVLDSDGSFFLYSKLTVDKSRWQQGNVFSCSVMHEA
LHNHYTQKSLSLSPGKGGSGGSGGSGGSGGSGGSGGSGGSGGSGGSGCDLPQTHSLGSRRTLMLLAQ
MRRISLFSCLKDRHDFGFPQEEFGNQFQKAETIPVLHEMIQQIFNLFSTKDSSAAWDETLLDKFYTELYQQL
NDLEACVIQGVGVEETPLMKEDSILAVRKYFQRITLYLKEKKYSPCAWEVVRAEIMASFSLSTNLQESLRSK
E
4. RICHCL50(opt4)-5*GGS-Fc3 (P-1479)
(SEQ ID NO: 1489)
DVQLVESGGGLVQPGGSLRLSCAASGSFSSINVMGWYRQAPGKERELVARITNLGLPNYADSVKGRFTIS
RDNSKNTVYLQMNSLRPEDTAVYYCYLVALKAEYWGQGTLVTVSSGGSGGSGGSGGSGGSDKTHTCPP
CPAPEAAGGPSVFLFPPKPKDTLMISRTPEVTCVVVDVSHEDPEVKFNWYVDGVEVHNAKTKPREEQYNS
TYRVVSVLTVLHQDWLNGKEYKCQVSNKALPAPIEKTISKAKGQPREPQVCTLPPSRDELTKNQVSLSCAV
KGFYPSDIAVEWESNGQPENNYKTTPPVLDSDGSFFLVSKLTVDKSRWQQGNVFSCSVMHEALHNHYTQ
KSLSLSPGK
5. Fc4-10*GGS-IFNa2_R149A (P-1483)
(SEQ ID NO: 1490)
DKTHTCPPCPAPEAAGGPSVFLFPPKPKDTLMISRTPEVTCVVVDVSHEDPEVKFNWYVDGVEVHNAKTK
PREEQYNSTYRVVSVLTVLHQDWLNGKEYKCQVSNKALPAPIEKTISKAKGQPREPQVYTLPPCRDELTKN
QVSLWCLVKGFYPSDIAVEWESNGQPENNYKTTPPVLDSDGSFFLYSKLTVDKSRWQQGNVFSCSVMHE
ALHNHYTQKSLSLSPGKGGSGGSGGSGGSGGSGGSGGSGGSGGSGGSGCDLPQTHSLGSRRTLMLLA
QMRRISLFSCLKDRHDFGFPQEEFGNQFQKAETIPVLHEMIQQIFNLFSTKDSSAAWDETLLDKFYTELYQQ
LNDLEACVIQGVGVTETPLMKEDSILAVRKYFQRITLYLKEKKYSPCAWEVVRAEIMASFSLSTNLQESLRSK
E
6. Fc4-10*GGS-IFNa2_R149A_T106E (P-1484)
(SEQ ID NO: 1491)
DKTHTCPPCPAPEAAGGPSVFLFPPKPKDTLMISRTPEVTCVVVDVSHEDPEVKFNWYVDGVEVHNAKTK
PREEQYNSTYRVVSVLTVLHQDWLNGKEYKCQVSNKALPAPIEKTISKAKGQPREPQVYTLPPCRDELTKN
QVSLWCLVKGFYPSDIAVEWESNGQPENNYKTTPPVLDSDGSFFLYSKLTVDKSRWQQGNVFSCSVMHE
ALHNHYTQKSLSLSPGKGGSGGSGGSGGSGGSGGSGGSGGSGGSGGSGCDLPQTHSLGSRRTLMLLA
QMRRISLFSCLKDRHDFGFPQEEFGNQFQKAETIPVLHEMIQQIFNLFSTKDSSAAWDETLLDKFYTELYQQ
LNDLEACVIQGVGVEETPLMKEDSILAVRKYFQRITLYLKEKKYSPCAWEVVRAEIMASFSLSTNLQESLRSK
E

### Production and Purification of Different Fc Formats

[1126] Production was performed in ExpiCHO cells as described above. Recombinant proteins were purified from the supernatant on a HiTrap Protein A HP (GE Healthcare) and eluted proteins were, after neutralization, desalted on a G25 column (GE Healthcare) followed by final and 0.22 μm filtration.

### Biological Activity on HL116 Reporter Cell-Lines

[1127] Biological activities of purified Fc-AFNs were measured as described in previous Examples. In brief, parental

[1128] HL116 and the derived HL116-hClec9A were stimulated for six hours with a serial dilution of Fc-AFNs. Luciferase activity was measured and plotted in FIG. 34. Data show that all 4 constructs have a similar potency and specificity for target cells only.

### PK Study in Mouse

[1129] In total 9 mice were dosed intravenously at 1 mg/kg with each construct. K-EDTA blood was taken from a first group of 3 mice at 5 minutes, 8 hours and 6 days, from a second group of 3 mice at 15 minutes, 1 day and 10 days and from a third group of 3 mice at 2 hours, 3 days and 14 days. The concentration of intact Fc-AFN was measured by ELISA. In brief the MAXISORP Nunc Immune plates (Thermo Scientific) were coated overnight with anti-human interferon alpha mAb (clone MMHA-13; PBL Assay Science) at 0.5 μg/ml in PBS. After washing the plates four times with PBS+0.05% Tween-20, they were blocked with 0.1% Casein in PBS for at least 1 hour at room temperature. Subsequently, diluted samples and standards were incubated in 0.1% Casein in PBS for 2 hours at room temperature. After another wash cycle a custom made rabbit-anti-VHH (diluted 1/20000 in 0.1% Casein in PBS) was incubated for 2 hours at room temperature followed by an additional wash cycle and incubation with HRP-conjugated goat anti-rabbit (Jackson—111-035-144; 1:5000 in 0.1% Casein) for 1 hour at room temperature. After a final washing cycle, peroxidase activity was measured using KPL substrate (5120-0047; SeraCare) according to the manufacturer's instructions. Concentrations from samples were calculated using GraphPad Prism. Measured concentrations are plotted in FIG. 35 and show that all 4 constructs have a similar PK profile except for a somewhat faster clearance of the Ridgway based Fc-construct at the last sampling time point. Terminal half-life was estimated on average at about 3 days for the Ridgway constructs and 4.5 days for the Merchant constructs.

### Example 14: Efficacy Study in Humanized Mouse

[1130] To evaluate the in vivo efficacy of the Fc-based AFNs the same 4 molecules as selected in Example 12 (targeted to human CLEC9A, a highly specific cDC1 marker) were tested in a tumor model in a humanized mouse. In brief, newborn NSG mice (1-2 days of age) were sublethal irradiated with 100 cGy prior to intrahepatic delivery of 1×10⁵ CD34+ human stem cells (from HLA-A2 positive cord bloods). At week 13 after stem cell transfer mice were subcutaneously inoculated with 25×10⁵ human RL follicular lymphoma cells (ATCC CRL-2261; not sensitive to the direct anti-proliferative effect of IFN). Mice were treated daily intraperitoneally with 30 μg of human Flt3L protein, from day 10 to day 19 after tumor inoculation. Weekly intravenous injection with buffer or Fc-AFN (8 or 75 μg) was initiated at day 11 after tumor inoculation, when a palpable tumor was visible (n=5 mice per group). Tumor size (caliper measurements), body weight and temperature were assessed daily. Data in FIG. 36 and FIG. 37 show the tumor growth until 6 days after the second treatment (mice received weekly injections with either PBS or AFN, the data show tumor growth up to 7 days after the second weekly treatment). FIG. 36 demonstrates that all constructs induced a similar level of tumor growth inhibition at the lower dose of 8 μg. FIG. 37 shows the result of higher doses for a Merchant construct resulting in increasing tumor growth inhibition. Data on body weight and temperature did not show any major difference between buffer treatment and AFN treatment supporting that all AFN treatments were well tolerated.

### Example 15: PD-L1 VHH-Based Fc AFNs

[1131] In this Example, PD-L1 (programmed death-ligand 1) targeted Fc AFNs based on a human PD-L1 specific VHH (clone 2LIG99; blocks interaction with PD-1) for targeting to tumour cells or activated immune cells were generated and evaluated.

### Constructs:

2LIG99-_HA-tag_20*GGS-Fc-20*GGS-IFNa2_R149A_H6 (P-991)
(SEQ ID NO: 1492)
QVQLQESGGGLVQAGGSLRLSCTASGTIFSINRMDWFRQAPGKQRELVALITSDGTPAYADSAKGRF
TISRDNTKKTVSLQMNSLKPEDTAVYYCHVSSGVYNYWGQGTQVTVSSAAAYPYDVPDYGSGGSGG
SGGSGGSGGSGGSGGSGGSGGSGGSGGSGGSGGSGGSGGSGGSGGSGGSGGSGGSDKTHTC
PPCPAPEAAGGPSVFLFPPKPKDTLMISRTPEVTCVVVDVSHEDPEVKFNWYVDGVEVHNAKTKPRE
EQYNSTYRVVSVLTVLHQDWLNGKEYKCKVSNKALGAPIEKTISKAKGQPREPQVYTLPPSRDELTKN
QVSLTCLVKGFYPSDIAVEWESNGQPENNYKTTPPVLDSDGSFFLYSKLTVDKSRWQQGNVFSCSV
MHEALHNHYTQKSLSLSPGKGGSGGSGGSGGSGGSGGSGGSGGSGGSGGSGGSGGSGGSGGS
GGSGGSGGSGGSGGSGGSGCDLPQTHSLGSRRTLMLLAQMRKISLFSCLKDRHDFGFPQEEFGNQ
FQKAETIPVLHEMIQQIFNLFSTKDSSAAWDETLLDKFYTELYQQLNDLEACVIQGVGVTETPLMKEDSI
LAVRKYFQRITLYLKEKKYSPCAWEVVRAEIMASFSLSTNLQESLRSKEHHHHHH
2LIG99-20*GGS-Fc1 (P-1040)
(SEQ ID NO: 1493)
QVQLQESGGGLVQAGGSLRLSCTASGTIFSINRMDWFRQAPGKQRELVALITSDGTPAYADSAKGRF
TISRDNTKKTVSLQMNSLKPEDTAVYYCHVSSGVYNYWGQGTQVTVSSGGSGGSGGSGGSGGSGG
SGGSGGSGGSGGSGGSGGSGGSGGSGGSGGSGGSGGSGGSGGSDKTHTCPPCPAPEAAGGPS
VFLFPPKPKDTLMISRTPEVTCVVVDVSHEDPEVKFNWYVDGVEVHNAKTKPREEQYNSTYRVVSVL
TVLHQDWLNGKEYKCKVSNKALGAPIEKTISKAKGQPREPQVYTLPPSRDELTKNQVSLTCLVKGFYP
SDIAVEWESNGQPENNYKTTPPVLDSDGSFFLTSKLTVDKSRWQQGNVFSCSVMHEALHNHYTQKS
LSLSPGK
Fc2-20*GGS-IFNa2_R149A (P-959)
(SEQ ID NO: 1494)
DKTHTCPPCPAPEAAGGPSVFLFPPKPKDTLMISRTPEVTCVVVDVSHEDPEVKFNWYVDGVEVHNA
KTKPREEQYNSTYRVVSVLTVLHQDWLNGKEYKCKVSNKALGAPIEKTISKAKGQPREPQVYTLPPS
RDELTKNQVSLYCLVKGFYPSDIAVEWESNGQPENNYKTTPPVLDSDGSFFLYSKLTVDKSRWQQG
NVFSCSVMHEALHNHYTQKSLSLSPGKGGSGGSGGSGGSGGSGGSGGSGGSGGSGGSGGSGGS
GGSGGSGGSGGSGGSGGSGGSGGSGCDLPQTHSLGSRRTLMLLAQMRKISLFSCLKDRHDFGFPQ
EEFGNQFQKAETIPVLHEMIQQIFNLFSTKDSSAAWDETLLDKFYTELYQQLNDLEACVIQGVGVTETP
LMKEDSILAVRKYFQRITLYLKEKKYSPCAWEVVRAEIMASFSLSTNLQESLRSKE
2LIG99-20*GGS-Fc3 (P-1415)
(SEQ ID NO: 1495)
QVQLQESGGGLVQAGGSLRLSCTASGTIFSINRMDWFRQAPGKQRELVALITSDGTPAYADSAKGRF
TISRDNTKKTVSLQMNSLKPEDTAVYYCHVSSGVYNYWGQGTQVTVSSGGSGGSGGSGGSGGSGG
SGGSGGSGGSGGSGGSGGSGGSGGSGGSGGSGGSGGSGGSGGSDKTHTCPPCPAPEAAGGPS
VFLFPPKPKDTLMISRTPEVTCVVVDVSHEDPEVKFNWYVDGVEVHNAKTKPREEQYNSTYRVVSVL
TVLHQDWLNGKEYKCQVSNKALPAPIEKTISKAKGQPREPQVCTLPPSRDELTKNQVSLSCAVKGFY
PSDIAVEWESNGQPENNYKTTPPVLDSDGSFFLVSKLTVDKSRWQQGNVFSCSVMHEALHNHYTQK
SLSLSPGK
2LIG99-20*GGS-Fc4-20*GGS-IFNa2_R149A (P-1412)
(SEQ ID NO: 1496)
QVQLQESGGGLVQAGGSLRLSCTASGTIFSINRMDWFRQAPGKQRELVALITSDGTPAYADSAKGRF
TISRDNTKKTVSLQMNSLKPEDTAVYYCHVSSGVYNYWGQGTQVTVSSGGSGGSGGSGGSGGSGG
SGGSGGSGGSGGSGGSGGSGGSGGSGGSGGSGGSGGSGGSGGSDKTHTCPPCPAPEAAGGPS
VFLFPPKPKDTLMISRTPEVTCVVVDVSHEDPEVKFNWYVDGVEVHNAKTKPREEQYNSTYRVVSVL
TVLHQDWLNGKEYKCQVSNKALPAPIEKTISKAKGQPREPQVYTLPPCRDELTKNQVSLWCLVKGFY
PSDIAVEWESNGQPENNYKTTPPVLDSDGSFFLYSKLTVDKSRWQQGNVFSCSVMHEALHNHYTQK
SLSLSPGKGGSGGSGGSGGSGGSGGSGGSGGSGGSGGSGGSGGSGGSGGSGGSGGSGGSGGS
GGSGGSCDLPQTHSLGSRRTLMLLAQMRKISLFSCLKDRHDFGFPQEEFGNQFQKAETIPVLHEMIQ
QIFNLFSTKDSSAAWDETLLDKFYTELYQQLNDLEACVIQGVGVEETPLMKEDSILAVRKYFQRITLYLK
EKKYSPCAWEVVRAEIMASFSLSTNLQESLRSKE

### Production and Purification of PD-L1 VHH-Based AFN

[1133] Homodimeric (2LIG99-20*GGS-Fc-20*GGS-IFNα2_R149A; scheme: FIG. 1A), monovalent heterodimeric (2LIG99-20*GGS-Fc1+Fc2-20*GGS-IFNα2_R149A; scheme: FIG. 7B), or the bivalent targeted heterodimeric (2LIG99-20*GGS-Fc3+2LIG99-20*GGS-Fc4-20*GGS-IFNα2_R149A; FIG. 16A) variants of the 2LIG99 Fc AFN (for a schematic representation, see FIG. 38) were produced in ExpiCHO cells by transient transfection of the corresponding constructs according to the manufacturer's guidelines. One week after transfection, supernatant was collected and cells removed by centrifugation. Recombinant proteins were purified from the supernatant using the Pierce Protein A spin plates (Thermo Fisher). The homodimeric 2LIG99-20*GGS-Fc-20*GGS-IFNa2_R149A was considerably less stable after purification with a high tendency to aggregate, while the two other constructs showed good solubility.

### Biological Activity on HL116 Reporter Cell-Lines

[1134] The HL116 clone is derived from the human HT1080 cell line (ATCC CCL-121). It contains the firefly luciferase gene controlled by the IFN-inducible 6-16 promoter. Parental HL116 cells express PD-L1 endogenously, so targeting was evaluated in the absence or presence of an excess of the corresponding free PD-L1 VHH (2LIG99). Parental HL116 were seeded overnight at 20,000 cells per 96-well, pre-incubated with 2LIG99 (20 μg/ml) and subsequently stimulated with a serial dilution of Fc AFNs for 6 hours. Luciferase activity was measured in cell lysates. Data in the FIG. 38 illustrate that the homodimeric and monovalent heterodimeric variants are comparably active (EC₅₀ values of 2.98 and 2.14 ng/ml respectively), while the bivalent targeted heterodimeric variant is 40-50 times more active. In all three cases, excess of free VHH is sufficient to block signaling thereby illustrating the PD-L1 dependence of the signaling.

### Example 16: Efficacy Study in Humanized Mouse

[1135] To evaluate the in vivo efficacy of Fc-based PD-L1 targeted AFNs, the homodimer variant (2LIG99-20*GGS-Fc-20*GGS-IFNa2_R149A) as described in Example 15 was tested in a tumor model in a humanized mouse. Protein production was performed in ExpiCHO cells as described above. Recombinant proteins were purified from the supernatant on a HiTrap Protein A HP (GE Healthcare). Low pH-eluted proteins were after neutralization desalted on a G25 column (GE Healthcare) and 0.22 μm filtered. Newborn NSG mice (1-2 days of age) were sublethal irradiated with 100 cGy prior to intrahepatic delivery of 1×10⁵CD34+ human stem cells (from HLA-A2 positive cord bloods). At week 13 after stem cell transfer mice were subcutaneously inoculated with 25×10⁵ human RL follicular lymphoma cells (ATCC CRL-2261; not sensitive to the direct anti-proliferative effect of IFN). Mice were treated daily intraperitoneally with 30 μg of human Flt3L protein, from day 5 to day 18 after tumor inoculation. Weekly perilesional injection with PBS or Fc-AFN (27 μg) or the PD-L1 blocking monoclonal antibody atezolizumab (30 μg; InVivoGen Catalog No.: hpdl1-mab12) was initiated at day 9 after tumor inoculation, when a palpable tumor was present (n=6 mice per group). Tumor size (caliper measurements), body weight and temperature were assessed daily. Data in FIG. 39 show the tumor growth until 7 days after the second treatment (mice received weekly injections with either PBS or AFN, the data show tumor growth up to 7 days after the second weekly treatment), demonstrating the superiority of PD-L1 targeted Fc-AFN versus PBS or even atezolizumab treatment. Data on body weight and temperature did not show any major difference between buffer treatment of AFN treatment supporting that all AFN treatments were well tolerated.

### Example 17: Clec4C VHH-Based Fc AFNs

[1136] In this Example, Clec4C targeted Fc AFNs based on a human Clec4C specific VHH (clone 2CL92) for targeting to plasmacytoid dendritic cell were generated and evaluated.

### Constructs:

Clec4C VHH-20*GGS-Fc3 (P-1571)
(SEQ ID NO: 1497)
QVQLQESGGGSVQAGDSLRLSCAASGRTFSGYAMGWFRQAPGKEREFVAT
ISTSGSSTYYADSVKGRFTISRDNAKKSVYLQINSLKTEDAAVYYCAARL
SFDNTAFYTSAIRYSYWGQGTQVTVSSGGSGGSGGSGGSGGSGGSGGSGG
SGGSGGSGGSGGSGGSGGSGGSGGSGGSGGSGGSGGSDKTHTCPPCPAPE
AAGGPSVFLFPPKPKDTLMISRTPEVTCVVVDVSHEDPEVKFNWYVDGVE
VHNAKTKPREEQYNSTYRVVSVLTVLHQDWLNGKEYKCQVSNKALPAPIE
KTISKAKGQPREPQVCTLPPSRDELTKNQVSLSCAVKGFYPSDIAVEWES
NGQPENNYKTTPPVLDSDGSFFLVSKLTVDKSRWQQGNVFSCSVMHEALH
NHYTQKSLSLSPGK
Fc4-20*GGS-IFNa2_R149A (P-1414)
(SEQ ID NO: 1498)
DKTHTCPPCPAPEAAGGPSVFLFPPKPKDTLMISRTPEVTCVVVDVSHED
PEVKFNWYVDGVEVHNAKTKPREEQYNSTYRVVSVLTVLHQDWLNGKEYK
CQVSNKALPAPIEKTISKAKGQPREPQVYTLPPCRDELTKNQVSLWCLVK
GFYPSDIAVEWESNGQPENNYKTTPPVLDSDGSFFLYSKLTVDKSRWQQG
NVFSCSVMHEALHNHYTQKSLSLSPGKGGSGGSGGSGGSGGSGGSGGSGG
SGGSGGSGGSGGSGGSGGSGGSGGSGGSGGSGGSGGSCDLPQTHSLGSRR
TLMLLAQMRKISLFSCLKDRHDFGFPQEEFGNQFQKAETIPVLHEMIQQI
FNLFSTKDSSAAWDETLLDKFYTELYQQLNDLEACVIQGVGVEETPLMKE
DSILAVRKYFQRITLYLKEKKYSPCAWEVVRAEIMASFSLSTNLQESLRS
KE

### Production and Purification of Clec4C VHH-Based AFN

[1138] Constructs Clec4C VHH-20*GGS-Fc3 and Fc4-20*GGS-IFNa2_R149A were combined to a heterodimeric AFN (for a schematic representation, see FIG. 7B) and transiently expressed in the ExpiCHO expression system (Thermo Fisher) according to the manufacturer's guidelines. One week after transfection, supernatant was collected and cells removed by centrifugation. Recombinant proteins were purified from the supernatant using the Pierce Protein A spin plates (Thermo Fisher).

### Biological Activity on HL116 Reporter Cell-Lines

[1139] The HL116 clone is derived from the human HT1080 cell line (ATCC CCL-121). It contains the firefly luciferase gene controlled by the IFN-inducible 6-16 promoter. Parental HL116 cells were transfected with an expression vector encoding the human Clec4C sequence. Stable transfected clones were selected in G418-containing medium. Parental HL116 and HL116-hClec4C cells were seeded overnight at 20,000 cells per 96-well and subsequently stimulated with a serial dilution of Fc AFNs for 6 hours. Luciferase activity was measured in cell lysates. Data in the FIG. 40 illustrate that both cell-lines are comparably sensitive to wild type IFNα2, while the Clec4C Fc AFN is much more active on targeted cells (HL116-hClec4C) compared to untargeted cells (parental HL116).

### Example 18: CD20 VHH-Based Fc AFNs

[1140] In this Example, CD20 targeted Fc AFNs based on a human CD20 specific VHH (clone 2HCD25) for targeting to B-cells and/or B-cell derived tumour cells were generated and evaluated.

### Constructs:

CD20 VHH-20*GGS-Fc3 (P-1570)
(SEQ ID NO: 1499)
QVQLQESGGGLAQAGGSLRLSCAASGRTFSMGWFRQAPGKEREFVAAITY
SGGSPYYASSVRGRFTISRDNAKNTVYLQMNSLKPEDTAVYYCAANPTYG
SDWNAENWGQGTQVTVSSGGSGGSGGSGGSGGSGGSGGSGGSGGSGGSGG
SGGSGGSGGSGGSGGSGGSGGSGGSGGSDKTHTCPPCPAPEAAGGPSVFL
FPPKPKDTLMISRTPEVTCVVVDVSHEDPEVKFNWYVDGVEVHNAKTKPR
EEQYNSTYRVVSVLTVLHQDWLNGKEYKCQVSNKALPAPIEKTISKAKGQ
PREPQVCTLPPSRDELTKNQVSLSCAVKGFYPSDIAVEWESNGQPENNYK
TTPPVLDSDGSFFLVSKLTVDKSRWQQGNVFSCSVMHEALHNHYTQKSLS
LSPGK
Fc4-20*GGS-IFNa2_R149A (P-1414)
(SEQ ID NO: 1500)
DKTHTCPPCPAPEAAGGPSVFLFPPKPKDTLMISRTPEVTCVVVDVSHED
PEVKFNWYVDGVEVHNAKTKPREEQYNSTYRVVSVLTVLHQDWLNGKEYK
CQVSNKALPAPIEKTISKAKGQPREPQVYTLPPCRDELTKNQVSLWCLVK
GFYPSDIAVEWESNGQPENNYKTTPPVLDSDGSFFLYSKLTVDKSRWQQG
NVFSCSVMHEALHNHYTQKSLSLSPGKGGSGGSGGSGGSGGSGGSGGSGG
SGGSGGSGGSGGSGGSGGSGGSGGSGGSGGSGGSGGSCDLPQTHSLGSRR
TLMLLAQMRKISLFSCLKDRHDFGFPQEEFGNQFQKAETIPVLHEMIQQI
FNLFSTKDSSAAWDETLLDKFYTELYQQLNDLEACVIQGVGVEETPLMKE
DSILAVRKYFQRITLYLKEKKYSPCAWEVVRAEIMASFSLSTNLQESLRS
KE

### Production and Purification of CD20 VHH-Based AFN

[1142] Constructs CD20 VHH-20*GGS-Fc3 and Fc4-20*GGS-IFNa2_R149A were combined to a heterodimeric AFN (for a schematic representation, see FIG. 7B) and transiently expressed in the ExpiCHO expression system (Thermo Fisher) according to the manufacturer's guidelines. One week after transfection, supernatant was collected and cells removed by centrifugation. Recombinant proteins were purified from the supernatant using the Pierce Protein A spin plates (Thermo Fisher).

### Biological Activity on HL116 Reporter Cell-Lines

[1143] The HL116 clone is derived from the human HT1080 cell line (ATCC CCL-121). It contains the firefly luciferase gene controlled by the IFN-inducible 6-16 promoter. Parental HL116 cells were transfected with an expression vector encoding the human CD20 sequence. Stable transfected clones were selected in G418-containing medium. Parental HL116 and HL116-hCD20 cells were seeded overnight at 20,000 cells per 96-well and subsequently stimulated with a serial dilution of Fc AFNs for 6 hours. Luciferase activity was measured in cell lysates. Data in the FIG. 41 illustrate that both cell-lines are comparably sensitive to wild type IFNα2, while the CD20 Fc AFN is much more active on targeted cells (HL116-hCD20) compared to untargeted cells (parental HL116).

### Example 19: CD13 VHH-Based Fc AFNs

[1144] In this Example, CD13 targeted Fc AFNs based on a human CD13 specific VHH for targeting to tumour stromal cells were generated and evaluated.

### Constructs:

CD13 VHH-20*GGS-Fc3 (P-1569)
Fc4-20*GGS-IFNa2_R149A (P-1414)
(SEQ ID NO: 1501)
DKTHTCPPCPAPEAAGGPSVFLFPPKPKDTLMISRTPEVTCVVVDVSHED
PEVKFNWYVDGVEVHNAKTKPREEQYNSTYRVVSVLTVLHQDWLNGKEYK
CQVSNKALPAPIEKTISKAKGQPREPQVYTLPPCRDELTKNQVSLWCLVK
GFYPSDIAVEWESNGQPENNYKTTPPVLDSDGSFFLYSKLTVDKSRWQQG
NVFSCSVMHEALHNHYTQKSLSLSPGKGGSGGSGGSGGSGGSGGSGGSGG
SGGSGGSGGSGGSGGSGGSGGSGGSGGSGGSGGSGGSCDLPQTHSLGSRR
TLMLLAQMRKISLFSCLKDRHDFGFPQEEFGNQFQKAETIPVLHEMIQQI
FNLFSTKDSSAAWDETLLDKFYTELYQQLNDLEACVIQGVGVEETPLMKE
DSILAVRKYFQRITLYLKEKKYSPCAWEVVRAEIMASFSLSTNLQESLRS
KE

### Production and Purification of CD13 VHH-Based AFN

[1146] Constructs CD13 VHH-20*GGS-Fc3 and Fc4-20*GGS-IFNa2_R149A were combined to a heterodimeric AFN (for a schematic representation, see FIG. 7B) and transiently expressed in the ExpiCHO expression system (Thermo Fisher) according to the manufacturer's guidelines. One week after transfection, supernatant was collected and cells removed by centrifugation. Recombinant proteins were purified from the supernatant using the Pierce Protein A spin plates (Thermo Fisher).

### Biological Activity on HL116 Reporter Cell-Lines

[1147] The HL116 clone is derived from the human HT1080 cell line (ATCC CCL-121). It contains the firefly luciferase gene controlled by the IFN-inducible 6-16 promoter. Parental HL116 cells express CD13 endogenously, so targeting will be evaluated in the absence or presence of an excess of the corresponding free CD13 VHH. Parental HL116 were therefor seeded overnight at 20,000 cells per 96-well, pre-incubated with CD13 VHH and subsequently stimulated with a serial dilution of Fc AFNs with excess for 6 hours. Luciferase activity was measured in cell lysates. Data in the FIG. 42 illustrate that stimulation in the presence of an excess CD13 VHH lowers biological activity 60-fold, thereby illustrating that the reconstitution of the IFN signaling is indeed depending on CD13 targeting.

### Example 20: FAP VHH-Based Fc AFNs

[1148] In this Example, FAP (fibroblast activation protein) targeted Fc AFNs based on three human FAP specific VHHs (clones 2PE14, 3PE12 and 3PE42) for targeting to tumour stromal cells were generated and evaluated.

### Constructs:

2PE14 VHH-20*GGS-Fc3 (P-1781)
(SEQ ID NO: 1502)
QVQLQESGGGLVQPGGSLRLSCAASGSTFSINAVAWYRQAPGKRRELVAG
ISGGGVTNYPDSVKGRFTISRDNAKNTVYLQMSSLKPEDTAVYYCNLWPP
RASPGGRVYWGQGTQVTVSSGGSGGSGGSGGSGGSGGSGGSGGSGGSGGS
GGSGGSGGSGGSGGSGGSGGSGGSGGSGGSDKTHTCPPCPAPEAAGGPSV
FLFPPKPKDTLMISRTPEVTCVVVDVSHEDPEVKFNWYVDGVEVHNAKTK
PREEQYNSTYRVVSVLTVLHQDWLNGKEYKCQVSNKALPAPIEKTISKAK
GQPREPQVCTLPPSRDELTKNQVSLSCAVKGFYPSDIAVEWESNGQPENN
YKTTPPVLDSDGSFFLVSKLTVDKSRWQQGNVFSCSVMHEALHNHYTQKS
LSLSPGK
3PE12 VHH-20*GGS-Fc3 (P-1782)
(SEQ ID NO: 1503)
QVQLQESGGGLVQPGGSLRLSCAASGSTFSGNAMAWYRQAPGKRRELVAG
ISGGGVTNYPDSVKGRFTISRDNAKNTVYLQMSSLKPEDTAVYYCNLWPP
RVSPGGGVYWGQGTQVTVSSGGSGGSGGSGGSGGSGGSGGSGGSGGSGGS
GGSGGSGGSGGSGGSGGSGGSGGSGGSGGSDKTHTCPPCPAPEAAGGPSV
FLFPPKPKDTLMISRTPEVTCVVVDVSHEDPEVKFNWYVDGVEVHNAKTK
PREEQYNSTYRVVSVLTVLHQDWLNGKEYKCQVSNKALPAPIEKTISKAK
GQPREPQVCTLPPSRDELTKNQVSLSCAVKGFYPSDIAVEWESNGQPENN
YKTTPPVLDSDGSFFLVSKLTVDKSRWQQGNVFSCSVMHEALHNHYTQKS
LSLSPGK
3PE42 VHH-20*GGS-Fc3 (P-1783)
(SEQ ID NO: 1504)
QVQLQESGGGLVQPGESLRLSCAVSGSTSSMNAMAWYRQAPGKRRELVAG
ISGGGATNYPDSVKGRFTISRDNAKNTVYLQMSSLKPEDTAVYYCNLWPP
RASPGGGVYWGQGTQVTVSSGGSGGSGGSGGSGGSGGSGGSGGSGGSGGS
GGSGGSGGSGGSGGSGGSGGSGGSGGSGGSDKTHTCPPCPAPEAAGGPSV
FLFPPKPKDTLMISRTPEVTCVVVDVSHEDPEVKFNWYVDGVEVHNAKTK
PREEQYNSTYRVVSVLTVLHQDWLNGKEYKCQVSNKALPAPIEKTISKAK
GQPREPQVCTLPPSRDELTKNQVSLSCAVKGFYPSDIAVEWESNGQPENN
YKTTPPVLDSDGSFFLVSKLTVDKSRWQQGNVFSCSVMHEALHNHYTQKS
LSLSPGK
Fc4-20*GGS-IFNa2_R149A (P-1414)
(SEQ ID NO: 1505)
DKTHTCPPCPAPEAAGGPSVFLFPPKPKDTLMISRTPEVTCVVVDVSHED
PEVKFNWYVDGVEVHNAKTKPREEQYNSTYRVVSVLTVLHQDWLNGKEYK
CQVSNKALPAPIEKTISKAKGQPREPQVYTLPPCRDELTKNQVSLWCLVK
GFYPSDIAVEWESNGQPENNYKTTPPVLDSDGSFFLYSKLTVDKSRWQQG
NVFSCSVMHEALHNHYTQKSLSLSPGKGGSGGSGGSGGSGGSGGSGGSGG
SGGSGGSGGSGGSGGSGGSGGSGGSGGSGGSGGSGGSCDLPQTHSLGSRR
TLMLLAQMRKISLFSCLKDRHDFGFPQEEFGNQFQKAETIPVLHEMIQQI
FNLFSTKDSSAAWDETLLDKFYTELYQQLNDLEACVIQGVGVEETPLMKE
DSILAVRKYFQRITLYLKEKKYSPCAWEVVRAEIMASFSLSTNLQESLRS
KE

### Production and Purification of FAP VHH-Based AFN

[1150] Constructs 2PE14-20*GGS-Fc3, 3PE12-20*GGS-Fc3, or 3PE42-20*GGS-Fc3 were combined with construct Fc4-20*GGS-IFNa2_R149A to heterodimeric AFNs (for a schematic representation, see FIG. 7B) and transiently expressed in the ExpiCHO expression system (Thermo Fisher) according to the manufacturer's guidelines. One week after transfection, supernatant was collected and cells removed by centrifugation. Recombinant proteins were purified from the supernatant using the Pierce Protein A spin plates (Thermo Fisher).

### Biological Activity on HL116 Reporter Cell-Lines

[1151] The HL116 clone is derived from the human HT1080 cell line (ATCC CCL-121). It contains the firefly luciferase gene controlled by the IFN-inducible 6-16 promoter. Parental HL116 cells were transfected with an expression vector encoding the human FAP sequence. Stable transfected clones were selected in G418-containing medium. Parental HL116 and HL116-hFAP cells were seeded overnight at 20,000 cells per 96-well and subsequently stimulated with a serial dilution of Fc AFNs for 6 hours. Luciferase activity was measured in cell lysates. Data in the FIG. 43 illustrates that both cell-lines are comparably sensitive to wild type IFNα2, while the FAP Fc AFNs is much more active on targeted cells (HL116-hFAP) compared to untargeted cells (parental HL116).

### Example 21: CD8 VHH-Based Fc AFNs

[1152] In this Example, CD8 targeted Fc AFNs based on a human CD8 specific VHH (clone 1CDA65) for targeting to cytotoxic T-cells were generated and evaluated.

### Constructs:

CD8 VHH-20*GGS-Fc3 (P-1568)
(SEQ ID NO: 1506)
QVQLQESGGGLVHPGGSLRLSCAASGRSFSSYFMGWFRQAPGKEREFVAG
IGWNDGSINYADSVKGRFTISRDNAKNTGYLQMNSLKPEDTAVYYCAASV
SLYGLEKSSAYTSWGQGTQVTVSSGGSGGSGGSGGSGGSGGSGGSGGSGG
SGGSGGSGGSGGSGGSGGSGGSGGSGGSGGSGGSDKTHTCPPCPAPEAAG
GPSVFLFPPKPKDTLMISRTPEVTCVVVDVSHEDPEVKFNWYVDGVEVHN
AKTKPREEQYNSTYRVVSVLTVLHQDWLNGKEYKCQVSNKALPAPIEKTI
SKAKGQPREPQVCTLPPSRDELTKNQVSLSCAVKGFYPSDIAVEWESNGQ
PENNYKTTPPVLDSDGSFFLVSKLTVDKSRWQQGNVFSCSVMHEALHNHY
TQKSLSLSPGK
Fc4-20*GGS-IFNa2_R149A (P-1414)
(SEQ ID NO: 1507)
DKTHTCPPCPAPEAAGGPSVFLFPPKPKDTLMISRTPEVTCVVVDVSHED
PEVKFNWYVDGVEVHNAKTKPREEQYNSTYRVVSVLTVLHQDWLNGKEYK
CQVSNKALPAPIEKTISKAKGQPREPQVYTLPPCRDELTKNQVSLWCLVK
GFYPSDIAVEWESNGQPENNYKTTPPVLDSDGSFFLYSKLTVDKSRWQQG
NVFSCSVMHEALHNHYTQKSLSLSPGKGGSGGSGGSGGSGGSGGSGGSGG
SGGSGGSGGSGGSGGSGGSGGSGGSGGSGGSGGSGGSCDLPQTHSLGSRR
TLMLLAQMRKISLFSCLKDRHDFGFPQEEFGNQFQKAETIPVLHEMIQQI
FNLFSTKDSSAAWDETLLDKFYTELYQQLNDLEACVIQGVGVEETPLMKE
DSILAVRKYFQRITLYLKEKKYSPCAWEVVRAEIMASFSLSTNLQESLRS
KE

### Production and Purification of CD8 VHH-Based AFN

[1154] Constructs CD8 VHH-20*GGS-Fc3 and Fc4-20*GGS-IFNα2_R149A were combined to a heterodimeric AFN (for a schematic representation, see FIG. 7B) and transiently expressed in the ExpiCHO expression system (Thermo Fisher) according to the manufacturer's guidelines. One week after transfection, supernatant was collected and cells removed by centrifugation. Recombinant proteins were purified from the supernatant using the Pierce Protein A spin plates (Thermo Fisher).

### Biological Activity on HL116 Reporter Cell-Lines

[1155] The HL116 clone is derived from the human HT1080 cell line (ATCC CCL-121). It contains the firefly luciferase gene controlled by the IFN-inducible 6-16 promoter. Parental HL116 cells were transfected with an expression vector encoding the human CD8 sequence. Stable transfected clones were selected in G418-containing medium. Parental HL116 and HL116-hCD8 cells were seeded overnight at 20,000 cells per 96-well and subsequently stimulated with a serial dilution of Fc AFNs for 6 hours. Luciferase activity was measured in cell lysates. Data in the FIG. 44 illustrate that both cell-lines are comparably sensitive to wild type IFNα2, while the CD8 Fc AFN is much more active on targeted cells (HL116-hCD8) compared to untargeted cells (parental HL116).

### Example 22: Monovalent Clec9A and PD-L1 Targeted Fc AFNs

[1156] In this Example, we generated and evaluated Fc AFNs targeting both Clec9A (marker for cDC1 dendritic cells) and PD-L1 (expressed on tumour cells and activated immune cells). For targeting, we used two VHHs: R1CHCL50 (human Clec9A specific) and 2LIG99 (human PD-L1 specific).

### Constructs:

Fc4-20*GGS-IFNa2_R149A (P-1414)
(SEQ ID NO: 1508)
DKTHTCPPCPAPEAAGGPSVFLFPPKPKDTLMISRTPEVTCVVVDVSHED
PEVKFNWYVDGVEVHNAKTKPREEQYNSTYRVVSVLTVLHQDWLNGKEYK
CQVSNKALPAPIEKTISKAKGQPREPQVYTLPPCRDELTKNQVSLWCLVK
GFYPSDIAVEWESNGQPENNYKTTPPVLDSDGSFFLYSKLTVDKSRWQQG
NVFSCSVMHEALHNHYTQKSLSLSPGKGGSGGSGGSGGSGGSGGSGGSGG
SGGSGGSGGSGGSGGSGGSGGSGGSGGSGGSGGSGGSCDLPQTHSLGSRR
TLMLLAQMRKISLFSCLKDRHDFGFPQEEFGNQFQKAETIPVLHEMIQQI
FNLFSTKDSSAAWDETLLDKFYTELYQQLNDLEACVIQGVGVEETPLMKE
DSILAVRKYFQRITLYLKEKKYSPCAWEVVRAEIMASFSLSTNLQESLRS
KE
R1CHCL50-20*GGS-2LIG99-20*GGS-Fc3 (P-1467)
(SEQ ID NO: 1509)
QVQLVESGGGLVHPGGSLRLSCAASGSFSSINVMGWYRQAPGKERELVAR
ITNLGLPNYADSVTGRFTISRDNAKNTVYLQMNSLKPEDTAVYYCYLVAL
KAEYWGQGTQVTVSSGGSGGSGGSGGSGGSGGSGGSGGSGGSGGSGGSGG
SGGSGGSGGSGGSGGSGGSGGSGGSQVQLQESGGGLVQAGGSLRLSCTAS
GTIFSINRMDWFRQAPGKQRELVALITSDGTPAYADSAKGRFTISRDNTK
KTVSLQMNSLKPEDTAVYYCHVSSGVYNYWGQGTQVTVSSGGSGGSGGSG
GSGGSGGSGGSGGSGGSGGSGGSGGSGGSGGSGGSGGSGGSGGSGGSGGS
DKTHTCPPCPAPEAAGGPSVFLFPPKPKDTLMISRTPEVTCVVVDVSHED
PEVKFNWYVDGVEVHNAKTKPREEQYNSTYRVVSVLTVLHQDWLNGKEYK
CQVSNKALPAPIEKTISKAKGQPREPQVCTLPPSRDELTKNQVSLSCAVK
GFYPSDIAVEWESNGQPENNYKTTPPVLDSDGSFFLVSKLTVDKSRWQQG
NVFSCSVMHEALHNHYTQKSLSLSPGK
2LIG99-20*GGS-R1CHCL50-20*GGS-Fc3 (P-1469)
(SEQ ID NO: 1510)
QVQLQESGGGLVQAGGSLRLSCTASGTIFSINRMDWFRQAPGKQRELVAL
ITSDGTPAYADSAKGRFTISRDNTKKTVSLQMNSLKPEDTAVYYCHVSSG
VYNYWGQGTQVTVSSGGSGGSGGSGGSGGSGGSGGSGGSGGSGGSGGSGG
SGGSGGSGGSGGSGGSGGSGGSGGSQVQLVESGGGLVHPGGSLRLSCAAS
GSFSSINVMGWYRQAPGKERELVARITNLGLPNYADSVTGRFTISRDNAK
NTVYLQMNSLKPEDTAVYYCYLVALKAEYWGQGTQVTVSSGGSGGSGGSG
GSGGSGGSGGSGGSGGSGGSGGSGGSGGSGGSGGSGGSGGSGGSGGSGGS
DKTHTCPPCPAPEAAGGPSVFLFPPKPKDTLMISRTPEVTCVVVDVSHED
PEVKFNWYVDGVEVHNAKTKPREEQYNSTYRVVSVLTVLHQDWLNGKEYK
CQVSNKALPAPIEKTISKAKGQPREPQVYTLPPCRDELTKNQVSLWCLVK
GFYPSDIAVEWESNGQPENNYKTTPPVLDSDGSFFLYSKLTVDKSRWQQG
NVFSCSVMHEALHNHYTQKSLSLSPGK

### Production and Purification of Clec9A and PD-L1 VHH-Based AFN

[1158] The following combinations were transiently transfected in ExpiCHO cells:
[1159] i. R1CHCL50-2LIG99-Fc3+Fc4-IFNα2_R149A (bispecific; monovalent targeting; scheme: FIG. 8B);
[1160] ii. 2LIG99-R1CHCL50-Fc3+Fc4-IFNα2_R149A (bispecific; monovalent targeting; scheme: FIG. 8B).

[1161] One week after transfection, supernatant was collected and cells removed by centrifugation. Recombinant proteins were purified from the supernatant using the Pierce Protein A spin plates (Thermo Fisher).

### Relative Affinity in FACS

[1162] To measure relative affinities for Clec9A and PD-L1 the bispecific targeted Fc AFNs, and HL116-hClec9A cells were incubated with a serial dilution of AFN in the absence or presence of an excess of the competing free VHH 2LIG99. Binding was detected by subsequent incubation with an FITC-coupled anti-human secondary Ab, measured on a MACSQuant X instrument (Miltenyi Biotech) and analysed using the FlowLogic software (Miltenyi Biotech). Data in FIG. 45 illustrates that both bispecific targeted AFNs can bind to both targets simultaneously resulting in increased affinity for cells expressing both targets.

### Example 23: Monovalent and Bivalent Clec9A and PD-L1 Targeted Fc AFNs

[1163] In this Example, we generated and evaluated Fc AFNs targeting both Clec9A (marker for cDC1 dendritic cells) and PD-L1 (expressed on tumour cells and activated immune cells). For targeting, we used two VHHs: R1CHCL50 (human Clec9A specific) and 2LIG99 (human PD-L1 specific). Two bispecific formats (one resulting in monovalent, the other in bivalent targeting) were compared with the monospecific Fc AFNs for biological activity. Bivalent-bispecific targeting is schematically represented in FIGS. 46A-D.

### Constructs:

R1CHCL50-20*GGS-Fc3 (P-1451)
(SEQ ID NO: 1511)
QVQLVESGGGLVHPGGSLRLSCAASGSFSSINVMGWYRQAPGKERELVARITNLGLPNYADSVTGR
FTISRDNAKNTVYLQMNSLKPEDTAVYYCYLVALKAEYWGQGTQVTVSSGGSGGSGGSGGSGGSG
GSGGSGGSGGSGGSGGSGGSGGSGGSGGSGGSGGSGGSGGSGGSDKTHTCPPCPAPEAAGGP
SVFLFPPKPKDTLMISRTPEVTCVVVDVSHEDPEVKFNWYVDGVEVHNAKTKPREEQYNSTYRVVSV
LTVLHQDWLNGKEYKCQVSNKALPAPIEKTISKAKGQPREPQVCTLPPSRDELTKNQVSLSCAVKGFY
PSDIAVEWESNGQPENNYKTTPPVLDSDGSFFLVSKLTVDKSRWQQGNVFSCSVMHEALHNHYTQK
SLSLSPGK
2LIG99-20*GGS-Fc3 (P-1415)
(SEQ ID NO: 1512)
QVQLQESGGGLVQAGGSLRLSCTASGTIFSINRMDWFRQAPGKQRELVALITSDGTPAYADSAKGRF
TISRDNTKKTVSLQMNSLKPEDTAVYYCHVSSGVYNYWGQGTQVTVSSGGSGGSGGSGGSGGSGG
SGGSGGSGGSGGSGGSGGSGGSGGSGGSGGSGGSGGSGGSGGSDKTHTCPPCPAPEAAGGPS
VFLFPPKPKDTLMISRTPEVTCVVVDVSHEDPEVKFNWYVDGVEVHNAKTKPREEQYNSTYRVVSVL
TVLHQDWLNGKEYKCQVSNKALPAPIEKTISKAKGQPREPQVCTLPPSRDELTKNQVSLSCAVKGFY
PSDIAVEWESNGQPENNYKTTPPVLDSDGSFFLVSKLTVDKSRWQQGNVFSCSVMHEALHNHYTQK
SLSLSPGK
Fc4-20*GGS-IFNa2_R149A (P-1414)
(SEQ ID NO: 1513)
DKTHTCPPCPAPEAAGGPSVFLFPPKPKDTLMISRTPEVTCVVVDVSHEDPEVKFNWYVDGVEVHNA
KTKPREEQYNSTYRVVSVLTVLHQDWLNGKEYKCQVSNKALPAPIEKTISKAKGQPREPQVYTLPPC
RDELTKNQVSLWCLVKGFYPSDIAVEWESNGQPENNYKTTPPVLDSDGSFFLYSKLTVDKSRWQQG
NVFSCSVMHEALHNHYTQKSLSLSPGKGGSGGSGGSGGSGGSGGSGGSGGSGGSGGSGGSGGS
GGSGGSGGSGGSGGSGGSGGSGGSCDLPQTHSLGSRRTLMLLAQMRKISLFSCLKDRHDFGFPQE
EFGNQFQKAETIPVLHEMIQQIFNLFSTKDSSAAWDETLLDKFYTELYQQLNDLEACVIQGVGVEETPL
MKEDSILAVRKYFQRITLYLKEKKYSPCAWEVVRAEIMASFSLSTNLQESLRSKE
2LIG99-20*GGS-Fc420*GGS--IFNa2_R149A (P-1412)
(SEQ ID NO: 1514)
QVQLQESGGGLVQAGGSLRLSCTASGTIFSINRMDWFRQAPGKQRELVALITSDGTPAYADSAKGRF
TISRDNTKKTVSLQMNSLKPEDTAVYYCHVSSGVYNYWGQGTQVTVSSGGSGGSGGSGGSGGSGG
SGGSGGSGGSGGSGGSGGSGGSGGSGGSGGSGGSGGSGGSGGSDKTHTCPPCPAPEAAGGPS
VFLFPPKPKDTLMISRTPEVTCVVVDVSHEDPEVKFNWYVDGVEVHNAKTKPREEQYNSTYRVVSVL
TVLHQDWLNGKEYKCQVSNKALPAPIEKTISKAKGQPREPQVYTLPPCRDELTKNQVSLWCLVKGFY
PSDIAVEWESNGQPENNYKTTPPVLDSDGSFFLYSKLTVDKSRWQQGNVFSCSVMHEALHNHYTQK
SLSLSPGKGGSGGSGGSGGSGGSGGSGGSGGSGGSGGSGGSGGSGGSGGSGGSGGSGGSGGS
GGSGGSCDLPQTHSLGSRRTLMLLAQMRKISLFSCLKDRHDFGFPQEEFGNQFQKAETIPVLHEMIQ
QIFNLFSTKDSSAAWDETLLDKFYTELYQQLNDLEACVIQGVGVEETPLMKEDSILAVRKYFQRITLYLK
EKKYSPCAWEVVRAEIMASFSLSTNLQESLRSKE
3LEC89-20*GGS-Fc3-20*GGS-2LIG99 (P-1413)
(SEQ ID NO: 1515)
QVQLQESGGGLVQPGGSLRLSCAASGRIFSVNAMGWYRQAPGKQRELVAAITNQGAPTYADSVKG
RFTISRDNAGNTVYLQMNSLRPEDTAVYYCKAFTRGDDYWGQGTQVTVSSGGSGGSGGSGGSGGS
GGSGGSGGSGGSGGSGGSGGSGGSGGSGGSGGSGGSGGSGGSGGSDKTHTCPPCPAPEAAGG
PSVFLFPPKPKDTLMISRTPEVTCVVVDVSHEDPEVKFNWYVDGVEVHNAKTKPREEQYNSTYRVVS
VLTVLHQDWLNGKEYKCQVSNKALPAPIEKTISKAKGQPREPQVCTLPPSRDELTKNQVSLSCAVKGF
YPSDIAVEWESNGQPENNYKTTPPVLDSDGSFFLVSKLTVDKSRWQQGNVFSCSVMHEALHNHYTQ
KSLSLSPGKGGSGGSGGSGGSGGSGGSGGSGGSGGSGGSGGSGGSGGSGGSGGSGGSGGSGG
SGGSGGSQVQLQESGGGLVQAGGSLRLSCTASGTIFSINRMDWFRQAPGKQRELVALITSDGTPAY
ADSAKGRFTISRDNTKKTVSLQMNSLKPEDTAVYYCHVSSGVYNYWGQGTQVTVSS
R1CHCL50-20*GGS-2LIG99-20*GGS-Fc3 (P-1467)
(SEQ ID NO: 1516)
QVQLVESGGGLVHPGGSLRLSCAASGSFSSINVMGWYRQAPGKERELVARITNLGLPNYADSVTGR
FTISRDNAKNTVYLQMNSLKPEDTAVYYCYLVALKAEYWGQGTQVTVSSGGSGGSGGSGGSGGSG
GSGGSGGSGGSGGSGGSGGSGGSGGSGGSGGSGGSGGSGGSGGSQVQLQESGGGLVQAGGSL
RLSCTASGTIFSINRMDWFRQAPGKQRELVALITSDGTPAYADSAKGRFTISRDNTKKTVSLQMNSLK
PEDTAVYYCHVSSGVYNYWGQGTQVTVSSGGSGGSGGSGGSGGSGGSGGSGGSGGSGGSGGS
GGSGGSGGSGGSGGSGGSGGSGGSGGSDKTHTCPPCPAPEAAGGPSVFLFPPKPKDTLMISRTPE
VTCVVVDVSHEDPEVKFNWYVDGVEVHNAKTKPREEQYNSTYRVVSVLTVLHQDWLNGKEYKCQV
SNKALPAPIEKTISKAKGQPREPQVCTLPPSRDELTKNQVSLSCAVKGFYPSDIAVEWESNGQPENNY
KTTPPVLDSDGSFFLVSKLTVDKSRWQQGNVFSCSVMHEALHNHYTQKSLSLSPGK
R1CHCL50-20*GGS-2LIG99-20*GGS-Fc4-20*GGS-IFNa2_R149A (P-1468)
(SEQ ID NO: 1517)
QVQLVESGGGLVHPGGSLRLSCAASGSFSSINVMGWYRQAPGKERELVARITNLGLPNYADSVTGR
FTISRDNAKNTVYLQMNSLKPEDTAVYYCYLVALKAEYWGQGTQVTVSSGGSGGSGGSGGSGGSG
GSGGSGGSGGSGGSGGSGGSGGSGGSGGSGGSGGSGGSGGSGGSQVQLQESGGGLVQAGGSL
RLSCTASGTIFSINRMDWFRQAPGKQRELVALITSDGTPAYADSAKGRFTISRDNTKKTVSLQMNSLK
PEDTAVYYCHVSSGVYNYWGQGTQVTVSSGGSGGSGGSGGSGGSGGSGGSGGSGGSGGSGGS
GGSGGSGGSGGSGGSGGSGGSGGSGGSDKTHTCPPCPAPEAAGGPSVFLFPPKPKDTLMISRTPE
VTCVVVDVSHEDPEVKFNWYVDGVEVHNAKTKPREEQYNSTYRVVSVLTVLHQDWLNGKEYKCQV
SNKALPAPIEKTISKAKGQPREPQVYTLPPCRDELTKNQVSLWCLVKGFYPSDIAVEWESNGQPENN
YKTTPPVLDSDGSFFLYSKLTVDKSRWQQGNVFSCSVMHEALHNHYTQKSLSLSPGKGGSGGSGGS
GGSGGSGGSGGSGGSGGSGGSGGSGGSGGSGGSGGSGGSGGSGGSGGSGGSCDLPQTHSLGS
RRTLMLLAQMRKISLFSCLKDRHDFGFPQEEFGNQFQKAETIPVLHEMIQQIFNLFSTKDSSAAWDET
LLDKFYTELYQQLNDLEACVIQGVGVEETPLMKEDSILAVRKYFQRITLYLKEKKYSPCAWEVVRAEIM
ASFSLSTNLQESLRSKE

### Production and Purification of CIec9A and PD-L1 VHH-Based AFN

[1165] The following combinations were transiently transfected in ExpiCHO cells:
[1166] i. R1CHCL50-Fc3+Fc4-IFNα2_R149A (mono-specific Clec9A; scheme: FIG. 7B);
[1167] ii. 2LIG99-Fc3+Fc4-IFNα2_R149A (mono-specific PD-L1; scheme: FIG. 7B);
[1168] iii. R1CHCL50-Fc3+2LIG99-Fc4-IFNα2_R149A (bispecific; monovalent targeting; scheme: FIG. 16A);
[1169] iv. 3LEC89-Fc3-2LIG99+Fc4-IFNα2_R149A (bispecific; monovalent targeting; scheme: FIG. 8A);
[1170] v. R1CHCL50-2LIG99-Fc3+R1CHCL50-2LIG99-Fc4-IFNα2_R149A (bispecific and bi-valent targeting; FIG. 46C).

[1171] One week after transfection, supernatant was collected and cells removed by centrifugation. Recombinant proteins were purified from the supernatant using the Pierce Protein A spin plates (Thermo Fisher).

### Biological Activity on HL116 Reporter Cell-Lines

[1172] The HL116 clone is derived from the human HT1080 cell line (ATCC CCL-121). It contains the firefly luciferase gene controlled by the IFN-inducible 6-16 promoter. Parental HL116 cells express PD-L1 endogenously and were therefore used to evaluate signaling based on PD-L1 targeting. The ‘untargeted’ situation was mimicked by stimulating cells in the presence of an excess free PD-L1 VHH 2LIG99. Clec9A targeting was evaluated by comparing signaling in parental HL116 vs HL116-hClec9A cells. Parental and derived cells were seeded overnight at 20,000 cells per 96-well, pre-incubated with 2LIG99 (20 μg/ml) (where indicated) and subsequently stimulated with a serial dilution of Fc AFNs for 6 hours. Luciferase activity was measured in cell lysates. Data in FIG. 47 and Table 12 illustrate, inter a/ia, that:
[1173] 2LIG99 containing Fc AFNs are active on both cell lines as expected, specificity of targeting is demonstrated by the competition with free VHH 2LIG99;
[1174] AFNs based on R1CHCL50 only are active only on HL116-hClec9A cells;
[1175] Bispecific AFNs are significantly more active on HL116-hClec9A cells (expressing both targets) compared to the monospecific variants or compared to parental HL116 expressing only PD-L1; and
[1176] The bispecific and bivalent targeting molecule has the lowest EC50 on the cell line expressing only PD-L1 confirming earlier findings of increased potency by bivalent targeting (Example 15).

TABLE 12
Biological activity of bi-specific
Clec9A-PD-L1 Fc AFN variants as show in FIG. 47.

| | | EC₅₀ (ng/ml) | |
|---|---|---|---|
| | | Parental | HL116- |
| | | HL116 | hClec9A |
| (i) | R1CHCL50-Fc3 + | ND | 0,14 |
| | Fc4-IFNa2_R149A | | |
| (ii) | 2LIG99-Fc3 + | 3,76 | 1,94 |
| | Fc4-IFNa2_R149A | | |
| (iii) | R1CHCL50-Fc3 + | 7,16 | 0,0005 |
| | 2LIG99-Fc4-IFNa2_R149A | | |
| (iv) | 3LEC89-Fc3-2LIG99 +. | 52,12 | 0,33 |
| | Fc4-IFNa2_R149A | | |
| (v) | R1CHCL50-2L1G99-Fc3 + | 0,76 | 0,012 |
| | R1CHCL50-2LIG99-Fc4-IFNa2_R149A | | |

### Example 24: Efficacy Study in Humanized Mouse

[1177] To evaluate the in vivo efficacy of Fc-based PD-L1 and/or CLEC9A targeted AFNs, a molecules (i), (ii), and (iii) as well as the mixture of molecules (i) and (ii) as described in Example 23; Table 12 were tested in a tumor model in a humanized mouse. Protein production was performed in ExpiCHO cells as described above. Recombinant proteins were purified from the supernatant on a HiTrap Protein A HP (GE Healthcare). Bound proteins were eluted from the column at pH 3.5 (25 mM Na-citrate) and neutralized with 1 M Tris pH8.8. Finally, the proteins were desalted on a G25 or desalted and polished on a G200 column (GE Healthcare) to 10 mM NH4-acetate pH5—123.5 mM NaCl—0.02% Tween20 and 0.22 μm filtered. Newborn NSG mice (1-2 days of age) were sublethal irradiated with 100 cGy prior to intrahepatic delivery of 1×10⁵CD34+ human stem cells (from HLA-A2 positive cord bloods). At week 13 after stem cell transfer mice were subcutaneously inoculated with 25×10⁵ human RL follicular lymphoma cells (ATCC CRL-2261). Mice were treated daily intraperitoneally with 30 μg of human Flt3L protein, from day 8 to day 15 after tumor inoculation. Intravenous injection with buffer or Fc-AFN was performed on at days 9 and 15 after tumor inoculation, when a palpable tumor was detected (n=4-5 mice per group). Animals were followed until 4 days after the second treatment. Tumor size (caliper measurements was assessed at regular intervals. FIG. 48 demonstrates the superiority that both the CLEC9A and the PD-L1 targeted AFN reduced tumor growth compared to buffer treatment only. The bispecific AFN targeted to both PD-L1 and CLEC9A appears superior over the single targeted AFNs or the combination of the single-targeted AFNs.

### Example 25: CD8 and Clec4C Targeted Fc AFNs

[1178] In this Example, we generated and evaluated Fc AFNs targeting both Clec4C (marker for plasmacytoid dendritic cells) and CD8 (T cell subset). For targeting, we used two VHHs: 2CL92 (human Clec4C specific) and 1CDA65 (human CD8 specific). The bispecific format will be compared with the monospecific Fc AFNs for biological activity on target expressing HL116 cells.

### Constructs:

Clec4C VHH-20*GGS-Fc3 (P-1571)
(SEQ ID NO: 1518)
QVQLQESGGGSVQAGDSLRLSCAASGRTFSGYAMGWFRQAPGKEREFVAT
ISTSGSSTYYADSVKGRFTISRDNAKKSVYLQINSLKTEDAAVYYCAARL
SFDNTAFYTSAIRYSYWGQGTQVTVSSGGSGGSGGSGGSGGSGGSGGSGG
SGGSGGSGGSGGSGGSGGSGGSGGSGGSGGSGGSGGSDKTHTCPPCPAPE
AAGGPSVFLFPPKPKDTLMISRTPEVTCVVVDVSHEDPEVKFNWYVDGVE
VHNAKTKPREEQYNSTYRVVSVLTVLHQDWLNGKEYKCQVSNKALPAPIE
KTISKAKGQPREPQVCTLPPSRDELTKNQVSLSCAVKGFYPSDIAVEWES
NGQPENNYKTTPPVLDSDGSFFLVSKLTVDKSRWQQGNVFSCSVMHEALH
NHYTQKSLSLSPGK
CD8 VHH-20*GGS-Fc3 (P-1568)
(SEQ ID NO: 1519)
QVQLQESGGGLVHPGGSLRLSCAASGRSFSSYFMGWFRQAPGKEREFVAG
IGWNDGSINYADSVKGRFTISRDNAKNTGYLQMNSLKPEDTAVYYCAASV
SLYGLEKSSAYTSWGQGTQVTVSSGGSGGSGGSGGSGGSGGSGGSGGSGG
SGGSGGSGGSGGSGGSGGSGGSGGSGGSGGSGGSDKTHTCPPCPAPEAAG
GPSVFLFPPKPKDTLMISRTPEVTCVVVDVSHEDPEVKFNWYVDGVEVHN
AKTKPREEQYNSTYRVVSVLTVLHQDWLNGKEYKCQVSNKALPAPIEKTI
SKAKGQPREPQVCTLPPSRDELTKNQVSLSCAVKGFYPSDIAVEWESNGQ
PENNYKTTPPVLDSDGSFFLVSKLTVDKSRWQQGNVFSCSVMHEALHNHY
TQKSLSLSPGK
Fc4-20*GGS-IFNa2_R149A (P-1414)
(SEQ ID NO: 1520)
DKTHTCPPCPAPEAAGGPSVFLFPPKPKDTLMISRTPEVTCVVVDVSHED
PEVKFNWYVDGVEVHNAKTKPREEQYNSTYRVVSVLTVLHQDWLNGKEYK
CQVSNKALPAPIEKTISKAKGQPREPQVYTLPPCRDELTKNQVSLWCLVK
GFYPSDIAVEWESNGQPENNYKTTPPVLDSDGSFFLYSKLTVDKSRWQQG
NVFSCSVMHEALHNHYTQKSLSLSPGKGGSGGSGGSGGSGGSGGSGGSGG
SGGSGGSGGSGGSGGSGGSGGSGGSGGSGGSGGSGGSCDLPQTHSLGSRR
TLMLLAQMRKISLFSCLKDRHDFGFPQEEFGNQFQKAETIPVLHEMIQQI
FNLFSTKDSSAAWDETLLDKFYTELYQQLNDLEACVIQGVGVEETPLMKE
DSILAVRKYFQRITLYLKEKKYSPCAWEVVRAEIMASFSLSTNLQESLRS
KE
CD8 VHH-20*GGS-Fc4-20*GGS-IFNa2_R149A (P-1628)
(SEQ ID NO: 1521)
QVQLQESGGGLVQPGGSLRLSCAASGSIFSINVMGWYRQTPGKERELVAK
ITNFGITSYADSAQGRFTISRGNAKNTVYLQMNSLKPEDTAVYYCNLDTT
GWGPPPYQYWGQGTQVTVSSGGSGGSGGSGGSGGSGGSGGSGGSGGSGGS
GGSGGSGGSGGSGGSGGSGGSGGSGGSGGSDKTHTCPPCPAPEAAGGPSV
FLFPPKPKDTLMISRTPEVTCVVVDVSHEDPEVKFNWYVDGVEVHNAKTK
PREEQYNSTYRVVSVLTVLHQDWLNGKEYKCQVSNKALPAPIEKTISKAK
GQPREPQVYTLPPCRDELTKNQVSLWCLVKGFYPSDIAVEWESNGQPENN
YKTTPPVLDSDGSFFLYSKLTVDKSRWQQGNVFSCSVMHEALHNHYTQKS
LSLSPGKGGSGGSGGSGGSGGSGGSGGSGGSGGSGGSGGSGGSGGSGGSG
GSGGSGGSGGSGGSGGSCDLPQTHSLGSRRTLMLLAQMRKISLFSCLKDR
HDFGFPQEEFGNQFQKAETIPVLHEMIQQIFNLFSTKDSSAAWDETLLDK
FYTELYQQLNDLEACVIQGVGVEETPLMKEDSILAVRKYFQRITLYLKEK
KYSPCAWEVVRAEIMASFSLSTNLQESLRSKE

### Production and Purification of Clec4C and CD8 VHH-Based AFNs

[1180] The following combinations were transiently transfected in ExpiCHO cells:
[1181] (i) Clec4C VHH-Fc3+Fc4-IFNα2_R149A (Clec4C specific AFN; scheme: FIG. 7B);
[1182] (ii) CD8 VHH-Fc3+Fc4-IFNα2_R149A (Clec4C specific AFN; scheme: FIG. 7B);
[1183] (iii) Clec4C VHH-Fc3+CD8 VHH-Fc4-IFNα2_R149A (bi-specific AFN; scheme: FIG. 16A).

[1184] One week after transfection, supernatant was collected and cells removed by centrifugation. Recombinant proteins were purified from the supernatant using the Pierce Protein A spin plates (Thermo Fisher).

### Biological Activity on HL116 Reporter Cell-Lines

[1185] The HL116 clone is derived from the human HT1080 cell line (ATCC CCL-121). It contains the firefly luciferase gene controlled by the IFN-inducible 6-16 promoter. Vectors encoding human Clec4C or human CD8 were stably transfected in these HL116 cells, resulting in the HL116-hClec4C and HL116-hCD8 cell lines. To measure biological activity, parental and derived cells were seeded overnight at 20,000 cells per 96-well and subsequently stimulated with a serial dilution of Fc AFNs for 6 hours. Luciferase activity was measured in cell lysates. Data in FIG. 49 illustrate that mono-specific Fc AFNs are only active on the respective HL116-hClec4C and HL116-hCD8 cell lines, while the bi-specific Fc AFN induces signaling in both cell lines, but not in parental cells.

### Example 26: scFv Xcr1 Ab AFNs

[1186] In this Example, we designed and evaluated AFNs based on a scFv variant of the human Xcr1 Ab 5G7 for targeting of conventional dendritic cells type 1 (cDC1) cells.

### Constructs:

scFv Xcr1 Ab-20*GGS-Fc3 (P-1620)
(SEQ ID NO: 1522)
DVVMTQTPLSLPVTLGNQASIFCRSSLGLVHRNGNTYLHWYLQKPGQSPK
LLIYKVSHRFSGVPDRFSGSGSGTDFTLKISRVEAEDLGVYFCSQSTHVP
WTFGGGTKLEIKGGGGSGGGGSGGGGSGGGGSQAYLQQSGAELVRPGASV
KMSCKASGYTFTSHNLHWVKQTPRQGLQWIGAIYPGNGNTAYNQKFKGKA
TLTVDKSSSTAYMQLSSLTSDDSAVYFCARWGSVVGDWYFDVWGTGTTVT
VSSSGGSGGSGGSGGSGGSGGSGGSGGSGGSGGSGGSGGSGGSGGSGGSG
GSGGSGGSGGSGGSDKTHTCPPCPAPEAAGGPSVFLFPPKPKDTLMISRT
PEVTCVVVDVSHEDPEVKFNWYVDGVEVHNAKTKPREEQYNSTYRVVSVL
TVLHQDWLNGKEYKCQVSNKALPAPIEKTISKAKGQPREPQVCTLPPSRD
ELTKNQVSLSCAVKGFYPSDIAVEWESNGQPENNYKTTPPVLDSDGSFFL
VSKLTVDKSRWQQGNVFSCSVMHEALHNHYTQKSLSLSPGK
Fc4-20*GGS-IFNa2_R149A (P-1414)
(SEQ ID NO: 1523)
DKTHTCPPCPAPEAAGGPSVFLFPPKPKDTLMISRTPEVTCVVVDVSHED
PEVKFNWYVDGVEVHNAKTKPREEQYNSTYRVVSVLTVLHQDWLNGKEYK
CQVSNKALPAPIEKTISKAKGQPREPQVYTLPPCRDELTKNQVSLWCLVK
GFYPSDIAVEWESNGQPENNYKTTPPVLDSDGSFFLYSKLTVDKSRWQQG
NVFSCSVMHEALHNHYTQKSLSLSPGKGGSGGSGGSGGSGGSGGSGGSGG
SGGSGGSGGSGGSGGSGGSGGSGGSGGSGGSGGSGGSCDLPQTHSLGSRR
TLMLLAQMRKISLFSCLKDRHDFGFPQEEFGNQFQKAETIPVLHEMIQQI
FNLFSTKDSSAAWDETLLDKFYTELYQQLNDLEACVIQGVGVEETPLMKE
DSILAVRKYFQRITLYLKEKKYSPCAWEVVRAEIMASFSLSTNLQESLRS
KE

Production and Purification of scFv Xcr1 Ab-Based AFN

[1188] Constructs scFv Xcr1 Ab-20*GGS-Fc3 and Fc4-20*GGS-IFNa2_R149A were combined to a heterodimeric AFN with a configuration outlined in FIG. 7B, and transiently expressed in the ExpiCHO expression system (Thermo Fisher) according to the manufacturer's guidelines. One week after transfection, supernatant was collected and cells removed by centrifugation. Recombinant proteins were purified from the supernatant using the Pierce Protein A spin plates (Thermo Fisher).

### Biological Activity on HL116 Reporter Cell-Lines

[1189] The HL116 clone is derived from the human HT1080 cell line (ATCC CCL-121). It contains the firefly luciferase gene controlled by the IFN-inducible 6-16 promoter. Parental HL116 cells were transfected with an expression vector encoding the human Xcr1 sequence. Stable transfected clones were selected in G418-containing medium. Parental HL116 and HL116-hXcr1 cells were seeded overnight at 20,000 cells per 96-well and subsequently stimulated with a serial dilution of Fc AFNs for 6 hours. Luciferase activity was measured in cell lysates. Data in the FIG. 50 illustrate that both cell-lines are comparably sensitive to wild type IFNα2, while the hXcr1 Fc AFN is more active on targeted cells (HL116-hXcr1) compared to untargeted cells (parental HL116).

### Example 28: Construction of scFv CD20 Ab AFNs

[1190] In this Example, we designed and evaluated AFNs based on a scFv variant of the human CD20 Ab Rituximab for targeting B- and tumor cells.

### Constructs:

scFv CD20 Ab-20*GGS-Fc3 (P-1622)
(SEQ ID NO: 1524)
QIVLSQSPAILSASPGEKVTMTCRASSSVSYIHWFQQKPGSSPKPWIYAT
SNLASGVPVRFSGSGSGTSYSLTISRVEAEDAATYYCQQWTSNPPTFGGG
TKLEIKRGSTGGGGSGGGGSGGGGSQVQLQQPGAELVKPGASVKMSCKAS
GYTFTSYNMHWVKQTPGRGLEWIGAIYPGNGDTSYNQKFKGKATLTADKS
SSTAYMQLSSLTSEDSAVYYCARSTYYGGDWYFNVWGAGTTVTVSSGGSG
GSGGSGGSGGSGGSGGSGGSGGSGGSGGSGGSGGSGGSGGSGGSGGSGGS
GGSGGSDKTHTCPPCPAPEAAGGPSVFLFPPKPKDTLMISRTPEVTCVVV
DVSHEDPEVKFNWYVDGVEVHNAKTKPREEQYNSTYRVVSVLTVLHQDWL
NGKEYKCQVSNKALPAPIEKTISKAKGQPREPQVCTLPPSRDELTKNQVS
LSCAVKGFYPSDIAVEWESNGQPENNYKTTPPVLDSDGSFFLVSKLTVDK
SRWQQGNVFSCSVMHEALHNHYTQKSLSLSPGK
Fc4-20*GGS-IFNa2_R149A (P-1414)
(SEQ ID NO: 1525)
DKTHTCPPCPAPEAAGGPSVFLFPPKPKDTLMISRTPEVTCVVVDVSHED
PEVKFNWYVDGVEVHNAKTKPREEQYNSTYRVVSVLTVLHQDWLNGKEYK
CQVSNKALPAPIEKTISKAKGQPREPQVYTLPPCRDELTKNQVSLWCLVK
GFYPSDIAVEWESNGQPENNYKTTPPVLDSDGSFFLYSKLTVDKSRWQQG
NVFSCSVMHEALHNHYTQKSLSLSPGKGGSGGSGGSGGSGGSGGSGGSGG
SGGSGGSGGSGGSGGSGGSGGSGGSGGSGGSGGSGGSCDLPQTHSLGSRR
TLMLLAQMRKISLFSCLKDRHDFGFPQEEFGNQFQKAETIPVLHEMIQQI
FNLFSTKDSSAAWDETLLDKFYTELYQQLNDLEACVIQGVGVEETPLMKE
DSILAVRKYFQRITLYLKEKKYSPCAWEVVRAEIMASFSLSTNLQESLRS
KE

Production and Purification of scFv CD20 Ab-Based AFN

[1192] Constructs scFv CD20 Ab-20*GGS-Fc3 and Fc4-20*GGS-IFNa2_R149A were combined to a heterodimeric AFN with a configuration outlined in FIG. 7B, and transiently expressed in the ExpiCHO expression system (Thermo Fisher) according to the manufacturer's guidelines. One week after transfection, supernatant was collected and cells removed by centrifugation. Recombinant proteins were purified from the supernatant using the Pierce Protein A spin plates (Thermo Fisher).

### Example 28: Characterization of scFv CD20 Ab AFNs

### Biological Activity on HL116 Reporter Cell-Lines

[1193] The HL116 clone is derived from the human HT1080 cell line (ATCC CCL-121). It contains the firefly luciferase gene controlled by the IFN-inducible 6-16 promoter. Parental HL116 cells were transfected with an expression vector encoding the human CD20 sequence. Stable transfected clones were selected in G418-containing medium. Parental HL116 and HL116-hCD20 cells were seeded overnight at 20,000 cells per 96-well and subsequently stimulated with a serial dilution of Fc AFNs for 6 hours. Luciferase activity was measured in cell lysates. Data in the FIG. 51 illustrate that both cell-lines are comparably sensitive to wild type IFNα2, while the hCD20 Fc AFN is more active on targeted cells (HL116-hCD20) compared to untargeted cells (parental HL116).

### Example 29: scFv CD20 Ab AFRs

[1194] In this Example, we target AcTafactors (AFRs) to B- or tumor cells using a scFv variant of the human CD20 Ab Rituximab. TNF, bearing the Y87F mutation, will be cloned as a single chain trimer (with GGGGS-linkers) on one Fc arm in the AFR.

### Constructs:

scFv CD20 Ab-20*GGS-Fc3 (P-1622)
(SEQ ID NO: 1526)
QIVLSQSPAILSASPGEKVTMTCRASSSVSYIHWFQQKPGSSPKPWIYAT
SNLASGVPVRFSGSGSGTSYSLTISRVEAEDAATYYCQQWTSNPPTFGGG
TKLEIKRGSTGGGGSGGGGSGGGGSQVQLQQPGAELVKPGASVKMSCKAS
GYTFTSYNMHWVKQTPGRGLEWIGAIYPGNGDTSYNQKFKGKATLTADKS
SSTAYMQLSSLTSEDSAVYYCARSTYYGGDWYFNVWGAGTTVTVSSGGSG
GSGGSGGSGGSGGSGGSGGSGGSGGSGGSGGSGGSGGSGGSGGSGGSGGS
GGSGGSDKTHTCPPCPAPEAAGGPSVFLFPPKPKDTLMISRTPEVTCVVV
DVSHEDPEVKFNWYVDGVEVHNAKTKPREEQYNSTYRVVSVLTVLHQDWL
NGKEYKCQVSNKALPAPIEKTISKAKGQPREPQVCTLPPSRDELTKNQVS
LSCAVKGFYPSDIAVEWESNGQPENNYKTTPPVLDSDGSFFLVSKLTVDK
SRWQQGNVFSCSVMHEALHNHYTQKSLSLSPGK
Fc4-20*GGS-3*TNF_Y87F (P-1545)
(SEQ ID NO: 1527)
DKTHTCPPCPAPEAAGGPSVFLFPPKPKDTLMISRTPEVTCVVVDVSHED
PEVKFNWYVDGVEVHNAKTKPREEQYNSTYRWSVLTVLHQDWLNGKEYKC
QVSNKALPAPIEKTISKAKGQPREPQVYTLPPCRDELTKNQVSLWCLVKG
FYPSDIAVEWESNGQPENNYKTTPPVLDSDGSFFLYSKLTVDKSRWQQGN
VFSCSVMHEALHNHYTQKSLSLSPGKGGSGGSGGSGGSGGSGGSGGSGGS
GGSGGSGGSGGSGGSGGSGGSGGSGGSGGSGGSGGSSSRTPSDKPVAHVV
ANPQAEGQLQWLNRRANALLANGVELRDNQLVVPSEGLYLIYSQVLFKGQ
GCPSTHVLLTHTISRIAVSFQTKVNLLSAIKSPCQRETPEGAEAKPWYEP
IYLGGVFQLEKGDRLSAEINRPDYLDFAESGQVYFGIIALGGGGSSSRTP
SDKPVAHVVANPQAEGQLQWLNRRANALLANGVELRDNQLVVPSEGLYLI
YSQVLFKGQGCPSTHVLLTHTISRIAVSFQTKVNLLSAIKSPCQRETPEG
AEAKPVVYEPIYLGGVFQLEKGDRLSAEINRPDYLDFAESGQVYFGIIAL
GGGGSSSRTPSDKPVAHVVANPQAEGQLQWLNRRANALLANGVELRDNQL
VVPSEGLYLIYSQVLFKGQGCPSTHVLLTHTISRIAVSFQTKVNLLSAIK
SPCQRETPEGAEAKPWYEPIYLGGVFQLEKGDRLSAEINRPDYLDFAESG
QVYFGIIAL

### Production and Purification of AFRs

[1196] Constructs scFv CD20 Ab-20*GGS-Fc3 and Fc4-20*GGS-3*TNF_Y87F were combined to a heterodimeric AFR with a configuration outlined in FIG. 7B, and transiently expressed in the ExpiCHO expression system (Thermo Fisher) according to the manufacturer's guidelines. One week after transfection, supernatant was collected and cells removed by centrifugation. Recombinant proteins were purified from the supernatant using the Pierce Protein A spin plates (Thermo Fisher).

### Biological Activity on HEK-Dual Reporter Cell-Lines

[1197] HEK-Dual TNF-α cells (InvivoGen) were derived from the human embryonic kidney 293 (HEK 293) cell line by stable co-transfection of two NF-κB-inducible reporter constructs based on either secreted alkaline phosphatase (SEAP) or a secreted luciferase (Lucia). Parental cells were stably transfected with an expression vector encoding the human CD20 sequence. Stable transfected clones were selected in puromycin-containing medium. Parental HEK-Dual and HEK-Dual-hCD20 cells were seeded at 20,000 cells per 96-well and subsequently stimulated overnight with a serial dilution of Fc AFRs. Secreted Lucia luciferase activity was measured using QUANTI-Luc (InvivoGen). Data in the FIG. 52 illustrate that both cell-lines are comparably sensitive to wild type TNF, while the CD20 Fc AFR is more active on targeted cells (HEK-Dual-hCD20) compared to untargeted cells (HEK-Dual).

### Example 30: FLT3L Fc AFNs

[1198] In this Example, we designed and evaluated AFNs based on FMS-like tyrosine kinase 3 ligand (FLT3L) for targeting of hematopoietic (blood) progenitors.

### Constructs

FLT3L-20*GGS-Fc3 (P-1623)
(SEQ ID NO: 1528)
TQDCSFQHSPISSDFAVKIRELSDYLLQDYPVTVASNLQDEELCGGLWRL
VLAQRWMERLKTVAGSKMQGLLERVNTEIHFVTKCAFQPPPSCLRFVQTN
ISRLLQETSEQLVALKPWITRQNFSRCLELQCQPDSSTLPPPWSPRPLEA
TAPTAPQPSGGSGGSGGSGGSGGSGGSGGSGGSGGSGGSGGSGGSGGSGG
SGGSGGSGGSGGSGGSGGSDKTHTCPPCPAPEAAGGPSVFLFPPKPKDTL
MISRTPEVTCVVVDVSHEDPEVKFNWYVDGVEVHNAKTKPREEQYNSTYR
VVSVLTVLHQDWLNGKEYKCQVSNKALPAPIEKTISKAKGQPREPQVCTL
PPSRDELTKNQVSLSCAVKGFYPSDIAVEWESNGQPENNYKTTPPVLDSD
GSFFLVSKLTVDKSRWQQGNVFSCSVMHEALHNHYTQKSLSLSPGK
Fc4-20*GGS-IFNa2_R149A (P-1414)
(SEQ ID NO: 1529)
DKTHTCPPCPAPEAAGGPSVFLFPPKPKDTLMISRTPEVTCVVVDVSHED
PEVKFNWYVDGVEVHNAKTKPREEQYNSTYRWSVLTVLHQDWLNGKEYKC
QVSNKALPAPIEKTISKAKGQPREPQVYTLPPCRDELTKNQVSLWCLVKG
FYPSDIAVEWESNGQPENNYKTTPPVLDSDGSFFLYSKLTVDKSRWQQGN
VFSCSVMHEALHNHYTQKSLSLSPGKGGSGGSGGSGGSGGSGGSGGSGGS
GGSGGSGGSGGSGGSGGSGGSGGSGGSGGSGGSGGSCDLPQTHSLGSRRT
LMLLAQMRKISLFSCLKDRHDFGFPQEEFGNQFQKAETIPVLHEMIQQIF
NLFSTKDSSAAWDETLLDKFYTELYQQLNDLEACVIQGVGVEETPLMKED
SILAVRKYFQRITLYLKEKKYSPCAWEVVRAEIMASFSLSTNLQESLRSK
E

### Production and Purification of FLT3L-Based AFN

[1200] Constructs FLT3L-20*GGS-Fc3 and Fc4-20*GGS-IFNa2_R149A were combined to an AFN variant with a configuration outlined in FIG. 7B, and transiently expressed in the ExpiCHO expression system (Thermo Fisher) according to the manufacturer's guidelines. One week after transfection, supernatant was collected and cells removed by centrifugation. Recombinant proteins were purified from the supernatant using the Pierce Protein A spin plates (Thermo Fisher).

### Biological Activity: STAT1 Phosphorylation in Transient Transfected Hek293T Cells

[1201] Hek293T cells were transiently transfected with a FLT3 expression plasmid or an empty vector (MOCK). Two days after transfection, cells were stimulated with a serial dilution (as indicated) wild type IFNa2 or FLT3L-Fc-AFN for 15 minutes at 37° C. After fixation (10 minutes, 37° C., Fix Buffer I; BD Biosciences), permeabilization (30 minutes, on ice, Perm III Buffer I; BD Biosciences) and washing, cells were stained with anti-STAT1 pY701 Ab (BD Biosciences). Samples were acquired with a MACSQuant X instrument (Miltenyi Biotec) and analysed using the FlowLogic software (Miltenyi Biotec). Data in FIG. 53 clearly illustrate that the FLT3L Fc AFN is only capable to induce STAT1 phosphorylation in FLT3 and not MOCK transfected cells, thereby illustrating that targeting using this ligand is possible. Of note, FLT3 or MOCK transfected cells are equally sensitive to wild type IFNa2.

### Example 31: PD-1Ec Fc AFNs

[1202] In this Example, we designed and evaluated AFNs based on the extracellular (ec) portion of programmed cell death protein 1 (PD-1) for targeting to PD-L1 expressing T and pro-B cells.

### Constructs:

PD-1ec-20*GGS-Fc3 (P-1829)
(SEQ ID NO: 1530)
PGWFLDSPDRPWNPPTFSPALLWTEGDNATFTCSFSNTSESFVLNWYRMS
PSNQTDKLAAFPEDRSQPGQDCRFRVTQLPNGRDFHMSVVRARRNDSGTY
LCGAISLAPKAQIKESLRAELRVTERRAEVPTAHPSPSPRPAGQFQTLVS
GGSGGSGGSGGSGGSGGSGGSGGSGGSGGSGGSGGSGGSGGSGGSGGSGG
SGGSGGSGGSDKTHTCPPCPAPEAAGGPSVFLFPPKPKDTLMISRTPEVT
CVVVDVSHEDPEVKFNWYVDGVEVHNAKTKPREEQYNSTYRVVSVLTVLH
QDWLNGKEYKCQVSNKALPAPIEKTISKAKGQPREPQVCTLPPSRDELTK
NQVSLSCAVKGFYPSDIAVEWESNGQPENNYKTTPPVLDSDGSFFLVSKL
TVDKSRWQQGNVFSCSVMHEALHNHYTQKSLSLSPGK
Fc4-20*GGS-IFNa2_R149A (P-1414)
(SEQ ID NO: 1531)
DKTHTCPPCPAPEAAGGPSVFLFPPKPKDTLMISRTPEVTCVVVDVSHED
PEVKFNWYVDGVEVHNAKTKPREEQYNSTYRWSVLTVLHQDWLNGKEYKC
QVSNKALPAPIEKTISKAKGQPREPQVYTLPPCRDELTKNQVSLWCLVKG
FYPSDIAVEWESNGQPENNYKTTPPVLDSDGSFFLYSKLTVDKSRWQQGN
VFSCSVMHEALHNHYTQKSLSLSPGKGGSGGSGGSGGSGGSGGSGGSGGS
GGSGGSGGSGGSGGSGGSGGSGGSGGSGGSGGSGGSCDLPQTHSLGSRRT
LMLLAQMRKISLFSCLKDRHDFGFPQEEFGNQFQKAETIPVLHEMIQQIF
NLFSTKDSSAAWDETLLDKFYTELYQQLNDLEACVIQGVGVEETPLMKED
SILAVRKYFQRITLYLKEKKYSPCAWEVVRAEIMASFSLSTNLQESLRSK
E

### Production and Purification of PD-1ec AFN

[1204] Constructs PD-1ec-20*GGS-Fc3 and Fc4-20*GGS-IFNa2_R149A were combined to a heterodimeric AFN with a configuration outlined in FIG. 7B, and transiently expressed in the ExpiCHO expression system (Thermo Fisher) according to the manufacturer's guidelines. One week after transfection, supernatant was collected and cells removed by centrifugation. Recombinant proteins were purified from the supernatant using the Pierce Protein A spin plates (Thermo Fisher).

### Biological Activity on HL116 Reporter Cell-Lines

[1205] The HL116 clone is derived from the human HT1080 cell line (ATCC CCL-121). It contains the firefly luciferase gene controlled by the IFN-inducible 6-16 promoter. Parental HL116 cells express PD-L1 (the ligand for PD-1) endogenously, so targeting was evaluated in the absence or presence of an excess of the PD-L1 VHH (2LIG99) that interferes with the PD-1/PD-L1 interaction. Cells were seeded overnight at 20,000 cells per 96-well and subsequently stimulated with a serial dilution of PD-1 Fc AFNs for 6 hours in the presence or absence of 2LIG99 VHH (50 μg/ml). Luciferase activity was measured in cell lysates. Data in the FIG. 54 illustrate that the VHH is able to, at least in part, neutralize signaling by the PD-1ec Fc AFN, thereby illustrating that it is possible to target mutated cytokines based on the PD-1/PD-L1 interaction.

### Example 32: PD-L1ec Fc AFNs

[1206] In this Example, we designed and evaluated AFNs based on the extracellular portion (ec) of programmed cell death ligand 1 (PD-L1) for targeting of tumor cells or activated immune cells.

### Constructs:

PD-L1ec-20*GGS-Fc3 (P-1830)
(SEQ ID NO: 1532)
FTVTVPKDLYVVEYGSNMTIECKFPVEKQLDLAALIVYWEMEDKNIIQFV
HGEEDLKVQHSSYRQRARLLKDQLSLGNAALQITDVKLQDAGVYRCMISY
GGADYKRITVKVNAPYNKINQRILVVDPVTSEHELTCQAEGYPKAEVIWT
SSDHQVLSGKTTTTNSKREEKLFNVTSTLRINTTTNEIFYCTFRRLDPEE
NHTAELVIPELPLAHPPNERSGGSGGSGGSGGSGGSGGSGGSGGSGGSGG
SGGSGGSGGSGGSGGSGGSGGSGGSGGSGGSDKTHTCPPCPAPEAAGGPS
VFLFPPKPKDTLMISRTPEVTCVVVDVSHEDPEVKFNWYVDGVEVHNAKT
KPREEQYNSTYRVVSVLTVLHQDWLNGKEYKCQVSNKALPAPIEKTISKA
KGQPREPQVCTLPPSRDELTKNQVSLSCAVKGFYPSDIAVEWESNGQPEN
NYKTTPPVLDSDGSFFLVSKLTVDKSRWQQGNVFSCSVMHEALHNHYTQK
SLSLSPGK
Fc4-20*GGS-IFNa2_R149A (P-1414)
(SEQ ID NO: 1533)
DKTHTCPPCPAPEAAGGPSVFLFPPKPKDTLMISRTPEVTCVVVDVSHED
PEVKFNWYVDGVEVHNAKTKPREEQYNSTYRWSVLTVLHQDWLNGKEYKC
QVSNKALPAPIEKTISKAKGQPREPQVYTLPPCRDELTKNQVSLWCLVKG
FYPSDIAVEWESNGQPENNYKTTPPVLDSDGSFFLYSKLTVDKSRWQQGN
VFSCSVMHEALHNHYTQKSLSLSPGKGGSGGSGGSGGSGGSGGSGGSGGS
GGSGGSGGSGGSGGSGGSGGSGGSGGSGGSGGSGGSCDLPQTHSLGSRRT
LMLLAQMRKISLFSCLKDRHDFGFPQEEFGNQFQKAETIPVLHEMIQQIF
NLFSTKDSSAAWDETLLDKFYTELYQQLNDLEACVIQGVGVEETPLMKED
SILAVRKYFQRITLYLKEKKYSPCAWEVVRAEIMASFSLSTNLQESLRSK
E

### Production and Purification of PD-L1ec-Based AFN

[1208] Constructs PD-L1ec-20*GGS-Fc3 and Fc4-20*GGS-IFNa2_R149A were combined to a heterodimeric AFN with a configuration outlined in FIG. 7B, and transiently expressed in the ExpiCHO expression system (Thermo Fisher) according to the manufacturer's guidelines. One week after transfection, supernatant was collected and cells removed by centrifugation. Recombinant proteins were purified from the supernatant using the Pierce Protein A spin plates (Thermo Fisher).

### Biological Activity on HL116 Reporter Cell-Lines

[1209] The HL116 clone is derived from the human HT1080 cell line (ATCC CCL-121). It contains the firefly luciferase gene controlled by the IFN-inducible 6-16 promoter. Parental HL116 cells were transfected with an expression vector encoding the human PD-1 sequence lacking its cytoplasmic tail. Stable transfected clones were selected in G418-containing medium. Parental HL116 and HL116-hPD-1 cells were seeded overnight at 20,000 cells per 96-well and subsequently stimulated with a serial dilution of Fc AFNs for 6 hours. Luciferase activity was measured in cell lysates. Data in the FIG. 55 illustrate that both cell-lines are comparably sensitive to wild type IFNα2, while the PD-L1ec Fc AFN is more active on targeted cells (HL116-PD-1) compared to untargeted cells (parental HL116).

### Example 33: Bivalent Ligand Targeted AFNs

[1210] In this Example, we designed and evaluated AFNs based on the use of bivalent extracellular (ec) portions of programmed cell death protein 1 (PD-1) for targeting to PD-L1 expressing T and pro-B cells or programmed cell death ligand 1 (PD-L1) for targeting of tumor cells or activated immune cells.

### Constructs:

PD-1ec-20*GGS-Fc3 (P-1829)
(SEQ ID NO: 1534)
PGWFLDSPDRPWNPPTFSPALLWTEGDNATFTCSFSNTSESFVLNWYRMS
PSNQTDKLAAFPEDRSQPGQDCRFRVTQLPNGRDFHMSVVRARRNDSGTY
LCGAISLAPKAQIKESLRAELRVTERRAEVPTAHPSPSPRPAGQFQTLVS
GGSGGSGGSGGSGGSGGSGGSGGSGGSGGSGGSGGSGGSGGSGGSGGSGG
SGGSGGSGGSDKTHTCPPCPAPEAAGGPSVFLFPPKPKDTLMISRTPEVT
CVVVDVSHEDPEVKFNWYVDGVEVHNAKTKPREEQYNSTYRVVSVLTVLH
QDWLNGKEYKCQVSNKALPAPIEKTISKAKGQPREPQVCTLPPSRDELTK
NQVSLSCAVKGFYPSDIAVEWESNGQPENNYKTTPPVLDSDGSFFLVSKL
TVDKSRWQQGNVFSCSVMHEALHNHYTQKSLSLSPGK
PD-1ec-20*GGS-Fc4-20*GGS-IFNa2_R149A
(SEQ ID NO: 1535)
PGWFLDSPDRPWNPPTFSPALLWTEGDNATFTCSFSNTSESFVLNWYRMS
PSNQTDKLAAFPEDRSQPGQDCRFRVTQLPNGRDFHMSVVRARRNDSGTY
LCGAISLAPKAQIKESLRAELRVTERRAEVPTAHPSPSPRPAGQFQTLVS
GGSGGSGGSGGSGGSGGSGGSGGSGGSGGSGGSGGSGGSGGSGGSGGSGG
SGGSGGSGGSDKTHTCPPCPAPEAAGGPSVFLFPPKPKDTLMISRTPEVT
CVVVDVSHEDPEVKFNWYVDGVEVHNAKTKPREEQYNSTYRVVSVLTVLH
QDWLNGKEYKCQVSNKALPAPIEKTISKAKGQPREPQVYTLPPCRDELTK
NQVSLWCLVKGFYPSDIAVEWESNGQPENNYKTTPPVLDSDGSFFLYSKL
TVDKSRWQQGNVFSCSVMHEALHNHYTQKSLSLSPGKGGSGGSGGSGGSG
GSGGSGGSGGSGGSGGSGGSGGSGGSGGSGGSGGSGGSGGSGGSGGSCDL
PQTHSLGSRRTLMLLAQMRKISLFSCLKDRHDFGFPQEEFGNQFQKAETI
PVLHEMIQQIFNLFSTKDSSAAWDETLLDKFYTELYQQLNDLEACVIQGV
GVEETPLMKEDSILAVRKYFQRITLYLKEKKYSPCAWEVVRAEIMASFSL
STNLQESLRSKE
PD-L1ec-20*GGS-Fc3 (P-1830)
(SEQ ID NO: 1536)
FTVTVPKDLYVVEYGSNMTIECKFPVEKQLDLAALIVYWEMEDKNIIQFV
HGEEDLKVQHSSYRQRARLLKDQLSLGNAALQITDVKLQDAGVYRCMISY
GGADYKRITVKVNAPYNKINQRILVVDPVTSEHELTCQAEGYPKAEVIWT
SSDHQVLSGKTTTTNSKREEKLFNVTSTLRINTTTNEIFYCTFRRLDPEE
NHTAELVIPELPLAHPPNERSGGSGGSGGSGGSGGSGGSGGSGGSGGSGG
SGGSGGSGGSGGSGGSGGSGGSGGSGGSGGSDKTHTCPPCPAPEAAGGPS
VFLFPPKPKDTLMISRTPEVTCVVVDVSHEDPEVKFNWYVDGVEVHNAKT
KPREEQYNSTYRVVSVLTVLHQDWLNGKEYKCQVSNKALPAPIEKTISKA
KGQPREPQVCTLPPSRDELTKNQVSLSCAVKGFYPSDIAVEWESNGQPEN
NYKTTPPVLDSDGSFFLVSKLTVDKSRWQQGNVFSCSVMHEALHNHYTQK
SLSLSPGK
PD-L1ec-20*GGS-Fc4-20*GGS-IFNa2_R149A
(SEQ ID NO: 1537)
FTVTVPKDLYVVEYGSNMTIECKFPVEKQLDLAALIVYWEMEDKNIIQFV
HGEEDLKVQHSSYRQRARLLKDQLSLGNAALQITDVKLQDAGVYRCMISY
GGADYKRITVKVNAPYNKINQRILVVDPVTSEHELTCQAEGYPKAEVIWT
SSDHQVLSGKTTTTNSKREEKLFNVTSTLRINTTTNEIFYCTFRRLDPEE
NHTAELVIPELPLAHPPNERSGGSGGSGGSGGSGGSGGSGGSGGSGGSGG
SGGSGGSGGSGGSGGSGGSGGSGGSGGSGGSDKTHTCPPCPAPEAAGGPS
VFLFPPKPKDTLMISRTPEVTCVVVDVSHEDPEVKFNWYVDGVEVHNAKT
KPREEQYNSTYRVVSVLTVLHQDWLNGKEYKCQVSNKALPAPIEKTISKA
KGQPREPQVYTLPPCRDELTKNQVSLWCLVKGFYPSDIAVEWESNGQPEN
NYKTTPPVLDSDGSFFLYSKLTVDKSRWQQGNVFSCSVMHEALHNHYTQK
SLSLSPGKGGSGGSGGSGGSGGSGGSGGSGGSGGSGGSGGSGGSGGSGGS
GGSGGSGGSGGSGGSGGSCDLPQTHSLGSRRTLMLLAQMRKISLFSCLKD
RHDFGFPQEEFGNQFQKAETIPVLHEMIQQIFNLFSTKDSSAAWDETLLD
KFYTELYQQLNDLEACVIQGVGVEETPLMKEDSILAVRKYFQRITLYLKE
KKYSPCAWEVVRAEIMASFSLSTNLQESLRSKE

### Production and Purification of Bivalent Ec-AFNs

[1212] The following combinations were transiently transfected in ExpiCHO cells:
[1213] i. PD-1ec-20*GGS-Fc3 and PD-1ec-20*GGS-Fc4-20*GGS-IFNα2_R149A (bispecific; monovalent targeting; scheme: FIG. 16A);
[1214] ii. PD-L1ec-20*GGS-Fc3 and PD-L1ec-20*GGS-Fc4-20*GGS-IFNα2_R149A (bispecific; monovalent targeting; scheme: FIG. 16A).

[1215] One week after transfection, supernatant was collected and cells removed by centrifugation. Recombinant proteins were purified from the supernatant using the Pierce Protein A spin plates (Thermo Fisher).

### Biological Activity on HL116 Reporter Cell-Lines

[1216] The HL116 clone is derived from the human HT1080 cell line (ATCC CCL-121). It contains the firefly luciferase gene controlled by the IFN-inducible 6-16 promoter. Parental HL116 cells express PD-L1 (the ligand for PD-1) endogenously, so targeting was evaluated in the absence or presence of an excess of free PD-L1 VHH (2LIG99) that interferes with the PD-1/PD-L1 interaction. In addition, the HL116 cells transfected with the human PD-1 sequence lacking its cytoplasmic tail (Example 32) was used to test the PD-L1 based construct. Cells were seeded overnight at 20,000 cells per 96-well and subsequently stimulated with a serial dilution of PD-1 Fc AFNs for 6 hours in the presence or absence of 2LIG99 VHH (50 μg/ml). Luciferase activity was measured in cell lysates.

### Example 34: NGR Peptide Based Fc-AFNs

[1217] In this example, we designed and evaluated AFNs targeted to CD13 in the tumor neovasculature with the NGR-peptide-motif as targeting agent. The sequence was cloned as a cyclic sgcNGRc peptide C-terminal of both Fc arms in the resulting NGR Fc AFN. Biological activity on parental HL116 cells was compared with that of a Clec9A-targeted Fc AFN.

### Constructs:

Fc1-20*GGS-R1CHCL50 (P-1215)
(SEQ ID NO: 1538)
DKTHTCPPCPAPEAAGGPSVFLFPPKPKDTLMISRTPEVTCVVVDVSHED
PEVKFNWYVDGVEVHNAKTKPREEQYNSTYRVVSVLTVLHQDWLNGKEYK
CKVSNKALGAPIEKTISKAKGQPREPQVYTLPPSRDELTKNQVSLTCLVK
GFYPSDIAVEWESNGQPENNYKTTPPVLDSDGSFFLTSKLTVDKSRWQQG
NVFSCSVMHEALHNHYTQKSLSLSPGKGGSGGSGGSGGSGGSGGSGGSGG
SGGSGGSGGSGGSGGSGGSGGSGGSGGSGGSGGSGGSDVQLVESGGGLVQ
PGGSLRLSCAASGSFSSINVMGWYRQAPGKERELVARITNLGLPNYADSV
KGRFTISRDNSKNTVYLQMNSLRPEDTAVYYCYLVALKAEYWGQGTLVTV
SS
IFNa2_R149A-20*GGS-Fc2 (P-1214)
(SEQ ID NO: 1539)
CDLPQTHSLGSRRTLMLLAQMRKISLFSCLKDRHDFGFPQEEFGNQFQKA
ETIPVLHEMIQQIFNLFSTKDSSAAWDETLLDKFYTELYQQLNDLEACVI
QGVGVTETPLMKEDSILAVRKYFQRITLYLKEKKYSPCAWEVVRAEIMAS
FSLSTNLQESLRSKEGGSGGSGGSGGSGGSGGSGGSGGSGGSGGSGGSGG
SGGSGGSGGSGGSGGSGGSGGSGGSDKTHTCPPCPAPEAAGGPSVFLFPP
KPKDTLMISRTPEVTCVVVDVSHEDPEVKFNWYVDGVEVHNAKTKPREEQ
YNSTYRVVSVLTVLHQDWLNGKEYKCKVSNKALGAPIEKTISKAKGQPRE
PQVYTLPPSRDELTKNQVSLYCLVKGFYPSDIAVEWESNGQPENNYKTTP
PVLDSDGSFFLYSKLTVDKSRWQQGNVFSCSVMHEALHNHYTQKSLSLSP
GK
Fc3-spcNGRc (P-1853)
(SEQ ID NO: 1540)
DKTHTCPPCPAPEAAGGPSVFLFPPKPKDTLMISRTPEVTCVVVDVSHED
PEVKFNWYVDGVEVHNAKTKPREEQYNSTYRVVSVLTVLHQDWLNGKEYK
CKVSNKALGAPIEKTISKAKGQPREPQVYTLPPSRDELTKNQVSLTCLVK
GFYPSDIAVEWESNGQPENNYKTTPPVLDSDGSFFLTSKLTVDKSRWQQG
NVFSCSVMHEALHNHYTQKSLSLSPGKSGCNGRC
IFNa2_R149A-20*GGS-Fc4-spcNGRc (P-1854)
(SEQ ID NO: 1541)
CDLPQTHSLGSRRTLMLLAQMRKISLFSCLKDRHDFGFPQEEFGNQFQKA
ETIPVLHEMIQQIFNLFSTKDSSAAWDETLLDKFYTELYQQLNDLEACVI
QGVGVTETPLMKEDSILAVRKYFQRITLYLKEKKYSPCAWEVVRAEIMAS
FSLSTNLQESLRSKEGGSGGSGGSGGSGGSGGSGGSGGSGGSGGSGGSGG
SGGSGGSGGSGGSGGSGGSGGSGGSDKTHTCPPCPAPEAAGGPSVFLFPP
KPKDTLMISRTPEVTCVVVDVSHEDPEVKFNWYVDGVEVHNAKTKPREEQ
YNSTYRVVSVLTVLHQDWLNGKEYKCKVSNKALGAPIEKTISKAKGQPRE
PQVYTLPPSRDELTKNQVSLYCLVKGFYPSDIAVEWESNGQPENNYKTTP
PVLDSDGSFFLYSKLTVDKSRWQQGNVFSCSVMHEALHNHYTQKSLSLSP
GKSGCNGRC

### Production and Purification of AFNs

[1219] Constructs were combined as follows and transiently expressed in the ExpiCHO expression system (Thermo Fisher) according to the manufacturer's guidelines:
[1220] (i) Clec9A VHH Fc AFN: Fc3-20*GGS-R1CHCL50+IFNα2_R149A-20*GGS-Fc4 (configuration as outlined in FIG. 7A);
[1221] (ii) NGR Fc AFN: Fc3-sgNGRc+IFNa2_R149A-20*GGS-Fc4-sgcNGRc (configuration as outlined in FIG. 16B).

[1222] One week after transfection, supernatant was collected and cells removed by centrifugation. Recombinant proteins were purified from the supernatant using the Pierce Protein A spin plates (Thermo Fisher).

### Biological Activity on HL116 Reporter Cell-Lines

[1223] The HL116 clone is derived from the human HT1080 cell line (ATCC CCL-121). It contains the firefly luciferase gene controlled by the IFN-inducible 6-16 promoter. Parental HL116 cells endogenously express the NGR target CD13. Cells were seeded overnight at 20.000 cells per 96-well and subsequently stimulated with a serial dilution of Fc AFNs for 6 hours. Luciferase activity was measured in cell lysates. Data in the FIG. 56 illustrate that the NGR Fc AFN is clearly more potent in inducing IFN-like signaling when compared to a Clec9A targeted Fc AFN showing the specificity of the NGR targeting.

### Example 35: Targeting of Wild Type IFNa2

[1224] In this Example, we compared signaling upon targeting of wild type IFNa2 or the AFN mutant IFNa2_R149A to specific populations within peripheral blood mononuclear cells (PBMCs). Cytokine, or mutant thereof, will be targeted using a CD20 VHH (clone 2HCD25), CD8 VHH (clone 1CDA65), or a Clec4C VHH (clone 2CL92) in an Fc context.

### Constructs:

CD20 VHH-20*GGS-Fc3 (P-1570)
(SEQ ID NO: 1542)
QVQLQESGGGLAQAGGSLRLSCAASGRTFSMGWFRQAPGKEREFVAAITY
SGGSPYYASSVRGRFTISRDNAKNTVYLQMNSLKPEDTAVYYCAANPTYG
SDWNAENWGQGTQVTVSSGGSGGSGGSGGSGGSGGSGGSGGSGGSGGSGG
SGGSGGSGGSGGSGGSGGSGGSGGSGGSDKTHTCPPCPAPEAAGGPSVFL
FPPKPKDTLMISRTPEVTCVVVDVSHEDPEVKFNWYVDGVEVHNAKTKPR
EEQYNSTYRVVSVLTVLHQDWLNGKEYKCQVSNKALPAPIEKTISKAKGQ
PREPQVCTLPPSRDELTKNQVSLSCAVKGFYPSDIAVEWESNGQPENNYK
TTPPVLDSDGSFFLVSKLTVDKSRWQQGNVFSCSVMHEALHNHYTQKSLS
LSPGK
CD8 VHH-20*GGS-Fc 3 (P-1568)
(SEQ ID NO: 1543)
QVQLQESGGGLVHPGGSLRLSCAASGRSFSSYFMGWFRQAPGKEREFVAG
IGWNDGSINYADSVKGRFTISRDNAKNTGYLQMNSLKPEDTAVYYCAASV
SLYGLEKSSAYTSWGQGTQVTVSSGGSGGSGGSGGSGGSGGSGGSGGSGG
SGGSGGSGGSGGSGGSGGSGGSGGSGGSGGSGGSDKTHTCPPCPAPEAAG
GPSVFLFPPKPKDTLMISRTPEVTCVVVDVSHEDPEVKFNWYVDGVEVHN
AKTKPREEQYNSTYRVVSVLTVLHQDWLNGKEYKCQVSNKALPAPIEKTI
SKAKGQPREPQVCTLPPSRDELTKNQVSLSCAVKGFYPSDIAVEWESNGQ
PENNYKTTPPVLDSDGSFFLVSKLTVDKSRWQQGNVFSCSVMHEALHNHY
TQKSLSLSPGK
Clec4C VHH-20*GGS-Fc3 (P-1571)
(SEQ ID NO: 1544)
QVQLQESGGGSVQAGDSLRLSCAASGRTFSGYAMGWFRQAPGKEREFVAT
ISTSGSSTYYADSVKGRFTISRDNAKKSVYLQINSLKTEDAAVYYCAARL
SFDNTAFYTSAIRYSYWGQGTQVTVSSGGSGGSGGSGGSGGSGGSGGSGG
SGGSGGSGGSGGSGGSGGSGGSGGSGGSGGSGGSGGSDKTHTCPPCPAPE
AAGGPSVFLFPPKPKDTLMISRTPEVTCVVVDVSHEDPEVKFNWYVDGVE
VHNAKTKPREEQYNSTYRVVSVLTVLHQDWLNGKEYKCQVSNKALPAPIE
KTISKAKGQPREPQVCTLPPSRDELTKNQVSLSCAVKGFYPSDIAVEWES
NGQPENNYKTTPPVLDSDGSFFLVSKLTVDKSRWQQGNVFSCSVMHEALH
NHYTQKSLSLSPGK
Fc4-20*GGS-IFNa2_R149A (P-1414)
(SEQ ID NO: 1545)
DKTHTCPPCPAPEAAGGPSVFLFPPKPKDTLMISRTPEVTCVVVDVSHED
PEVKFNWYVDGVEVHNAKTKPREEQYNSTYRVVSVLTVLHQDWLNGKEYK
CQVSNKALPAPIEKTISKAKGQPREPQVYTLPPCRDELTKNQVSLWCLVK
GFYPSDIAVEWESNGQPENNYKTTPPVLDSDGSFFLYSKLTVDKSRWQQG
NVFSCSVMHEALHNHYTQKSLSLSPGKGGSGGSGGSGGSGGSGGSGGSGG
SGGSGGSGGSGGSGGSGGSGGSGGSGGSGGSGGSGGSCDLPQTHSLGSRR
TLMLLAQMRKISLFSCLKDRHDFGFPQEEFGNQFQKAETIPVLHEMIQQI
FNLFSTKDSSAAWDETLLDKFYTELYQQLNDLEACVIQGVGVEETPLMKE
DSILAVRKYFQRITLYLKEKKYSPCAWEVVRAEIMASFSLSTNLQESLRS
KE
Fc4-20*GGS-IFNa2 (P-1538)
(SEQ ID NO: 1546)
DKTHTCPPCPAPEAAGGPSVFLFPPKPKDTLMISRTPEVTCVVVDVSHED
PEVKFNWYVDGVEVHNAKTKPREEQYNSTYRVVSVLTVLHQDWLNGKEYK
CQVSNKALPAPIEKTISKAKGQPREPQVYTLPPCRDELTKNQVSLWCLVK
GFYPSDIAVEWESNGQPENNYKTTPPVLDSDGSFFLYSKLTVDKSRWQQG
NVFSCSVMHEALHNHYTQKSLSLSPGKGGSGGSGGSGGSGGSGGSGGSGG
SGGSGGSGGSGGSGGSGGSGGSGGSGGSGGSGGSGGSCDLPQTHSLGSRR
TLMLLAQMRKISLFSCLKDRHDFGFPQEEFGNQFQKAETIPVLHEMIQQI
FNLFSTKDSSAAWDETLLDKFYTELYQQLNDLEACVIQGVGVEETPLMKE
DSILAVRKYFQRITLYLKEKKYSPCAWEVVRAEIMRSFSLSTNLQESLRS
KE

### Production and Purification of CD20 and Clec4C VHH-Based AFN

[1226] Combinations of these constructs were transiently transfected in ExpiCHO cells and resulted in following AFNs (for a schematic outline, see FIG. 7B):
[1227] (i) CD20 VHH-20*GGS-Fc3+Fc4-IFNa2_R149A
[1228] (ii) CD20 VHH-20*GGS-Fc3+Fc4-IFNa2
[1229] (iii) CD8 VHH-20*GGS-Fc3+Fc4-IFNa2_R149A
[1230] (iv) CD8 VHH-20*GGS-Fc3+Fc4-IFNa2
[1231] (v) Clec4C VHH-20*GGS-Fc3+Fc4-IFNa2_R149A
[1232] (vi) Clec4C VHH-20*GGS-Fc3+Fc4-IFNa2

[1233] One week after transfection, supernatant was collected, and cells removed by centrifugation. Recombinant proteins were purified from the supernatant using the Pierce Protein A spin plates (Thermo Fisher).

### Biological Activity Upon Clec4C Targeting: STAT1 Phosphorylation in PBMCs

[1234] Biological activity of Clec4C-targeted molecules was tested as follows: PBMCs from buffy coats of healthy donors were isolated using density gradient centrifugation with Ficoll-Paque (GE Healthcare). Dendritic cells were first enriched using the pan-DC enrichment kit (Miltenyi Biotec). Enriched cells were washed twice with FACS buffer (2% FBS, 1 mM EDTA in PBS) and stained with FITC-coupled anti-hClec4C (Miltenyi Biotec) for 20 minutes at 4° C. After two washes, cells were stimulated with a serial dilution of wild type or mutants Fc AFNs for 15 minutes at 37° C. After fixation (10 minutes, 37° C., Fix Buffer I; BD Biosciences) and permeabilization (30 minutes, on ice, Perm III Buffer I; BD Biosciences) and washing, cells were stained with anti-STAT1 pY701 Ab (BD Biosciences). Samples were acquired with a Wacquant X instrument (Miltenyi Biotec) and analysed using the FlowLogic software (Miltenyi Biotec). Data are summarized in FIG. 57. Clec4C positive and negative cells respond with similar potency (ratio of EC50s: ≈1) to wild type IFNa2. On the other hand, wild type or mutant IFNa2 is much more active when targeted with a Clec4C VHH to CLEC4C positive cells. The respective EC50 ratios are about 40 and >40.

### Biological Activity Upon CD8 Targeting: STAT1 Phosphorylation in PBMCs

[1235] Biological activity of CD8-targeted molecules was tested as follows: PBMCs from buffy coats of healthy donors were isolated using density gradient centrifugation with Ficoll-Paque (GE Healthcare). Cells were washed twice with FACS buffer (2% FBS, 1 mM EDTA in PBS) and stained with FITC-coupled anti-hCD8 (Miltenyi Biotec) for 20 minutes at 4° C. After two washes, cells were stimulated with a serial dilution of wild type or mutants Fc AFNs for 15 minutes at 37° C. After fixation (10 minutes, 37° C., Fix Buffer I; BD Biosciences) and permeabilization (30 minutes, on ice, Perm III Buffer I; BD Biosciences) and washing, cells were stained with anti-STAT1 pY701 Ab (BD Biosciences). Samples were acquired with a MACSQuant X instrument (Miltenyi Biotec) and analysed using the FlowLogic software (Miltenyi Biotec). Data are summarized in FIG. 58. CD8 positive and negative cells respond with similarly potency (ratio of EC50s: ≈1) to wild type IFNa2. On the other hand, wild type or mutant IFNa2 is much more active when targeted with a CD8 VHH to CD8 positive cells. The respective EC50 ratios are about 125 and >125.

### Biological Activity Upon CD20 Targeting: STAT1 Phosphorylation in PBMCs

[1236] Biological activity of CD20-targeted molecules was tested as follows: PBMCs from buffy coats of healthy donors were isolated using density gradient centrifugation with Ficoll-Paque (GE Healthcare). Cells were washed twice with FACS buffer (2% FBS, 1 mM EDTA in PBS) and B-cells stained with FITC-coupled anti-hCD19 (SinoBiologics) for 20 minutes at 4° C. After two washes, cells were stimulated with a serial dilution of wild type or mutants Fc AFNs for 15 minutes at 37° C. After fixation (10 minutes, 37° C., Fix Buffer I; BD Biosciences) and permeabilization (30 minutes, on ice, Perm III Buffer I; BD Biosciences) and washing, cells were stained with anti-STAT1 pY701 Ab (BD Biosciences). Samples were acquired with a MACSQuant X instrument (Miltenyi Biotec) and analysed using the FlowLogic software (Miltenyi Biotec). Data are summarized in FIG. 59. CD19 positive (i.e. B-cells) and negative cells respond with similarly potency (ratio of EC50s: ≈1) to wild type IFNa2. On the other hand, wild type or mutant IFNa2 is much more active when targeted with a CD20 VHH to CD19 positive cells. The respective EC50 ratios are about 25 and >500.

### Example 36: Alternative IFNa2 AFN Mutations

[1237] In this Example, several different residues in IFNα2 were mutated in a Clec9A targeted Fc AFN context to evaluate the effect on signaling in targeted and untargeted cells. The positions of the various mutations are shown in FIG. 60 (here, wild type is SEQ ID NO: 2).

### Constructs (FIG. 60)

30-LKDRHDFGFP-//-VVRAEIMRSFSLSTNLQESLRSKE-165: wild type IFNa2
30-...A......-//-........................-165: 0-1838: Fc4-hIFNa2_R33A
30-..........-//-..A.....................-165: 0-1839: Fc4-hIFNa2_R144A
30-..........-//-..I.....................-165: 0-1840: Fc4-hIFNa2_R144I
30-..........-//-..L.....................-165: 0-1841: Fc4-hIFNa2_R144L
30-..........-//-..S.....................-165: 0-1842: Fc4-hIFNa2_R144S
30-..........-//-..T.....................-165: 0-1843: Fc4-hIFNa2_R144T
30-..........-//-..Y.....................-165: 0-1844: Fc4-hIFNa2_R144Y
30-..........-//-...D....................-165: 0-1845: Fc4-hIFNa2_A145D
30-..........-//-...G....................-165: 0-1846: Fc4-hIFNa2_A145G
30-..........-//-...H....................-165: 0-1847: Fc4-hIFNa2_A145H
30-..........-//-...K....................-165: 0-1848: Fc4-hIFNa2_A145K
30-..........-//-...Y....................-165: 0-1849: Fc4-hIFNa2_A145Y
30-..........-//-......A.................-165: 0-1850: Fc4-hIFNa2_M148A
30-..........-//-.......A................-165: 0-1414: Fc4-hIFNa2_R149A
30-..........-//-...........A............-165: 0-1851: Fc4-hIFNa2_L153A

### Production and Purification of AFNs

[1239] Different mutation variants of Fc4-20*GGS-IFNa2 were combined with construct R1CHCL50-20*GGS-Fc3, resulting in an AFN with a structure outlined in FIG. 7B. Proteins were transiently expressed in the ExpiCHO expression system (Thermo Fisher) according to the manufacturer's guidelines. One week after transfection, supernatant was collected, and cells removed by centrifugation. Recombinant proteins were purified from the supernatant using the Pierce Protein A spin plates (Thermo Fisher).

### Biological Activity on HL116 Reporter Cell-Lines

[1240] The HL116 clone is derived from the human HT1080 cell line (ATCC CCL-121). It contains the firefly luciferase gene controlled by the IFN-inducible 6-16 promoter. Parental HL116 cells were transfected with an expression vector encoding the human Clec9A sequence. Stable transfected clones were selected in G418-containing medium. Parental HL116 and HL116-hClec9A cells were seeded overnight at 20,000 cells per 96-well and subsequently stimulated with different concentrations of Fc AFNs for 6 hours. Luciferase activity was measured in cell lysates. Data in the FIG. 61 illustrate that all mutations, result in an Fc AFN that preferentially signals in targeted cells (here hClec9A expressing HL116).

### Example 37: Actakines Based on Interferon Alpha 1

[1241] This Example evaluates and generate AcTakines based on wild type interferon alpha 1 (IFNα1) and targeted via a human Clec9A specific VHH (clone R1CHCL50).

### Constructs:

R1CHCL50-20*GGS-Fc3 (P-1451)
(SEQ ID NO: 1547)
QVQLVESGGGLVHPGGSLRLSCAASGSFSSINVMGWYRQAPGKERELVAR
ITNLGLPNYADSVTGRFTISRDNAKNTVYLQMNSLKPEDTAVYYCYLVAL
KAEYWGQGTQVTVSSGGSGGSGGSGGSGGSGGSGGSGGSGGSGGSGGSGG
SGGSGGSGGSGGSGGSGGSGGSGGSDKTHTCPPCPAPEAAGGPSVFLFPP
KPKDTLMISRTPEVTCVVVDVSHEDPEVKFNWYVDGVEVHNAKTKPREEQ
YNSTYRVVSVLTVLHQDWLNGKEYKCQVSNKALPAPIEKTISKAKGQPRE
PQVCTLPPSRDELTKNQVSLSCAVKGFYPSDIAVEWESNGQPENNYKTTP
PVLDSDGSFFLVSKLTVDKSRWQQGNVFSCSVMHEALHNHYTQKSLSLSP
GK
Fc4-20*GGS-IFNa1 (P-1852)
(SEQ ID NO: 1548)
DKTHTCPPCPAPEAAGGPSVFLFPPKPKDTLMISRTPEVTCVVVDVSHED
PEVKFNWYVDGVEVHNAKTKPREEQYNSTYRVVSVLTVLHQDWLNGKEYK
CQVSNKALPAPIEKTISKAKGQPREPQVYTLPPCRDELTKNQVSLWCLVK
GFYPSDIAVEWESNGQPENNYKTTPPVLDSDGSFFLYSKLTVDKSRWQQG
NVFSCSVMHEALHNHYTQKSLSLSPGKGGSGGSGGSGGSGGSGGSGGSGG
SGGSGGSGGSGGSGGSGGSGGSGGSGGSGGSGGSGGSCDLPETHSLDNRR
TLMLLAQMSRISPSSCLMDRHDFGFPQEEFDGNQFQKAPAISVLHELIQQ
IFNLFTTKDSSAAWDEDLLDKFCTELYQQLNDLEACVMQEERVGETPLMN
ADSILAVKKYFRRITLYLTEKKYSPCAWEVVRAEIMRSLSLSTNLQERLR
RKE

### Production and Purification of IFNα1 AFN

[1243] Constructs R1CHCL50-20*GGS-Fc3 and Fc4-20*GGS-IFNα1 were combined, resulting in an AFN with a structure outlined in FIG. 7B, and transiently expressed in the ExpiCHO expression system (Thermo Fisher) according to the manufacturer's guidelines. One week after transfection, supernatant was collected, and cells removed by centrifugation. Recombinant proteins were purified from the supernatant using the Pierce Protein A spin plates (Thermo Fisher).

### Biological Activity on HL116 Reporter Cell-Lines

[1244] The HL116 clone is derived from the human HT1080 cell line (ATCC CCL-121). It contains the firefly luciferase gene controlled by the IFN-inducible 6-16 promoter. Parental HL116 cells were transfected with an expression vector encoding the human Clec9A sequence. Stable transfected clones were selected in G418-containing medium. Parental HL116 and HL116-hClec9A cells were seeded overnight at 20,000 cells per 96-well and subsequently stimulated with a serial dilution of Fc AFNs for 6 hours. Luciferase activity was measured in cell lysates. Data in the FIG. 62 illustrate that both cell-lines are comparably sensitive to wild type IFNα1. The EC50 of IFNα1-based Fc AFN signaling in targeted cells is 0.3 ng/ml, while no luciferase induction could be measured in parental HL116 cells.

### Example 38: Actakines Based on Interferon ß

[1245] In this Example, we generated and evaluated AcTakines based on interferon beta with the W22G mutation (IFNb_W22G) and targeted via a human Clec9A specific VHH (clone R1CHCL50).

### Constructs:

R1CHCL50-20*GGS-Fc3 (P-1451)
(SEQ ID NO: 1549)
QVQLVESGGGLVHPGGSLRLSCAASGSFSSINVMGWYRQAPGKERELVAR
ITNLGLPNYADSVTGRFTISRDNAKNTVYLQMNSLKPEDTAVYYCYLVAL
KAEYWGQGTQVTVSSGGSGGSGGSGGSGGSGGSGGSGGSGGSGGSGGSGG
SGGSGGSGGSGGSGGSGGSGGSGGSDKTHTCPPCPAPEAAGGPSVFLFPP
KPKDTLMISRTPEVTCVVVDVSHEDPEVKFNWYVDGVEVHNAKTKPREEQ
YNSTYRVVSVLTVLHQDWLNGKEYKCQVSNKALPAPIEKTISKAKGQPRE
PQVCTLPPSRDELTKNQVSLSCAVKGFYPSDIAVEWESNGQPENNYKTTP
PVLDSDGSFFLVSKLTVDKSRWQQGNVFSCSVMHEALHNHYTQKSLSLSP
GK
Fc4-20*GGS-IFNb_W22G (P-1855)
(SEQ ID NO: 1550)
DKTHTCPPCPAPEAAGGPSVFLFPPKPKDTLMISRTPEVTCVVVDVSHED
PEVKFNWYVDGVEVHNAKTKPREEQYNSTYRVVSVLTVLHQDWLNGKEYK
CQVSNKALPAPIEKTISKAKGQPREPQVYTLPPCRDELTKNQVSLWCLVK
GFYPSDIAVEWESNGQPENNYKTTPPVLDSDGSFFLYSKLTVDKSRWQQG
NVFSCSVMHEALHNHYTQKSLSLSPGKGGSGGSGGSGGSGGSGGSGGSGG
SGGSGGSGGSGGSGGSGGSGGSGGSGGSGGSGGSGGSMSYNLLGFLQRSS
NFQCQKLLGQLNGRLEYCLKDRMNFDIPEEIKQLQQFQKEDAALTIYEML
QNIFAIFRQDSSSTGWNETIVENLLANVYHQINHLKTVLEEKLEKEDFTR
GKLMSSLHLKRYYGRILHYLKAKEYSHCAWTIVRVEILRNFYFINRLTGY
LRN

### Production and Purification of IFNb AFN

[1247] Constructs R1CHCL50-20*GGS-Fc3 and Fc4-20*GGS-IFNb_W22G were combined, resulting in an AFN with a structure outlined in FIG. 7B, and transiently expressed in the ExpiCHO expression system (Thermo Fisher) according to the manufacturer's guidelines. One week after transfection, supernatant was collected, and cells removed by centrifugation. Recombinant proteins were purified from the supernatant using the Pierce Protein A spin plates (Thermo Fisher).

### Biological Activity on HL116 Reporter Cell-Lines

[1248] The HL116 clone is derived from the human HT1080 cell line (ATCC CCL-121). It contains the firefly luciferase gene controlled by the IFN-inducible 6-16 promoter. Parental HL116 cells were transfected with an expression vector encoding the human Clec9A sequence. Stable transfected clones were selected in G418-containing medium. Parental HL116 and HL116-hClec9A cells were seeded overnight at 20,000 cells per 96-well and subsequently stimulated with a serial dilution of Fc AFNs for 6 hours. Luciferase activity was measured in cell lysates. Data in the FIG. 63 illustrate that both cell-lines are comparably sensitive to wild type IFNb, while the Clec9A-targeted Fc AFN is much more active on targeted cells (HL116-hClec9A) compared to untargeted cells (parental HL116).

### Example 39: Actakines Based on Interleukin-1

[1249] In this Example, we generated and evaluated AcTakines based on human interleukin-1 with the Q148G (hIL1b_Q148G) mutation and targeted via a human CD8 specific VHH (clone 1CDA65). The resulting AcTakine will be referred to as the AcTaleukin (ALN) hereafter.

### Constructs:

CD8 VHH-20*GGS-Fc3 (P-1568)
(SEQ ID NO: 1551)
QVQLQESGGGLVHPGGSLRLSCAASGRSFSSYFMGWFRQAPGKEREFVAGI
GWNDGSINYADSVKGRFTISRDNAKNTGYLQMNSLKPEDTAVYYCAASVSL
YGLEKSSAYTSWGQGTQVTVSSGGSGGSGGSGGSGGSGGSGGSGGSGGSGG
SGGSGGSGGSGGSGGSGGSGGSGGSGGSGGSDKTHTCPPCPAPEAAGGPSV
FLFPPKPKDTLMISRTPEVTCVVVDVSHEDPEVKFNWYVDGVEVHNAKTKP
REEQYNSTYRVVSVLTVLHQDWLNGKEYKCQVSNKALPAPIEKTISKAKGQ
PREPQVCTLPPSRDELTKNQVSLSCAVKGFYPSDIAVEWESNGQPENNYKT
TPPVLDSDGSFFLVSKLTVDKSRWQQGNVFSCSVMHEALHNHYTQKSLSLS
PGK
Fc4-20*GGS-IL1b_Q148G (P-1626)
(SEQ ID NO: 1552)
DKTHTCPPCPAPEAAGGPSVFLFPPKPKDTLMISRTPEVTCVVVDVSHEDP
EVKFNWYVDGVEVHNAKTKPREEQYNSTYRVVSVLTVLHQDWLNGKEYKCQ
VSNKALPAPIEKTISKAKGQPREPQVYTLPPCRDELTKNQVSLWCLVKGFY
PSDIAVEWESNGQPENNYKTTPPVLDSDGSFFLYSKLTVDKSRWQQGNVFS
CSVMHEALHNHYTQKSLSLSPGKGGSGGSGGSGGSGGSGGSGGSGGSGGSG
GSGGSGGSGGSGGSGGSGGSGGSGGSGGSGGSAPVRSLNCTLRDSQQKSLV
MSGPYELKALHLGGQDMEQQVVFSMSFVQGEESNDKIPVALGLKEKNLYLS
CVLKDDKPTLQLESVDPKNYPKKKMEKRFVFNKIEINNKLEFESAQFPNWY
ISTSQAENMPVFLGGTKGGQDITDFTMQFVSS

### Production and Purification of ALN

[1251] Constructs CD8 VHH-20*GGS-Fc3 and Fc4-20*GGS-IL1b_Q148G were combined and transiently expressed in the ExpiCHO expression system (Thermo Fisher) according to the manufacturer's guidelines. Resulting ALN has a structure as outlined in FIG. 7B. One week after transfection, supernatant was collected and cells removed by centrifugation. Recombinant proteins were purified from the supernatant using the Pierce Protein A spin plates (Thermo Fisher).

### Biological Activity on HEK-Blue IL-1β Cells

[1252] Biological activity of the resulting ALN was measured on HEK-Blue™ IL-1β Cells (InvivoGen) with an NF-κB/AP-1-inducible SEAP (secreted alkaline phosphatase) reporter. Therefore, cells were transiently transfected with an empty vector or an expression-plasmid encoding human CD8. 36 hours post transfection, cells were resuspended and stimulated overnight with a serial dilution wild type IL-1β or ALN. SEAP was measured using the Phospha-Light SEAP Reporter Gene Assay System (ThermoFisher) according to the manufacturer's guidelines. Data in FIG. 64 illustrate that MOCK or hCD8 transfected cells are comparably sensitive to wild type IL-1β, while ALN is specifically signals in cells expressing the target (here hCD8).

### Example 40: Actakines Based on Tumor Necrosis Factor

[1253] In this Example, we generated and evaluated AcTakines based on tumour necrosis factor with the Y87F mutation (TNF_Y87F) and targeted via a human Clec9A specific VHH (clone R1CHCL50). TNF_Y87F will be cloned as a single chain trimer (with GGGGS-linkers) on one Fc arm, and the resulting AcTakine will be referred to as the AcTafactor (AFR) hereafter.

### Constructs:

CD20 VHH-20*GGS-Fc3 (P-1570)
(SEQ ID NO: 1553)
QVQLQESGGGLAQAGGSLRLSCAASGRTFSMGWFRQAPGKEREFVAAITY
SGGSPYYASSVRGRFTISRDNAKNTVYLQMNSLKPEDTAVYYCAANPTYG
SDWNAENWGQGTQVTVSSGGSGGSGGSGGSGGSGGSGGSGGSGGSGGSGG
SGGSGGSGGSGGSGGSGGSGGSGGSGGSDKTHTCPPCPAPEAAGGPSVFL
FPPKPKDTLMISRTPEVTCVVVDVSHEDPEVKFNWYVDGVEVHNAKTKPR
EEQYNSTYRVVSVLTVLHQDWLNGKEYKCQVSNKALPAPIEKTISKAKGQ
PREPQVCTLPPSRDELTKNQVSLSCAVKGFYPSDIAVEWESNGQPENNYK
TTPPVLDSDGSFFLVSKLTVDKSRWQQGNVFSCSVMHEALHNHYTQKSLS
LSPGK
Fc4-20*GGS-3*TNF_Y87F (P-1545)
(SEQ ID NO: 1554)
DKTHTCPPCPAPEAAGGPSVFLFPPKPKDTLMISRTPEVTCVVVDVSHED
PEVKFNWYVDGVEVHNAKTKPREEQYNSTYRWSVLTVLHQDWLNGKEYKC
QVSNKALPAPIEKTISKAKGQPREPQVYTLPPCRDELTKNQVSLWCLVKG
FYPSDIAVEWESNGQPENNYKTTPPVLDSDGSFFLYSKLTVDKSRWQQGN
VFSCSVMHEALHNHYTQKSLSLSPGKGGSGGSGGSGGSGGSGGSGGSGGS
GGSGGSGGSGGSGGSGGSGGSGGSGGSGGSGGSGGSSSRTPSDKPVAHVV
ANPQAEGQLQWLNRRANALLANGVELRDNQLVVPSEGLYLIYSQVLFKGQ
GCPSTHVLLTHTISRIAVSFQTKVNLLSAIKSPCQRETPEGAEAKPWYEP
IYLGGVFQLEKGDRLSAEINRPDYLDFAESGQVYFGIIALGGGGSSSRTP
SDKPVAHVVANPQAEGQLQWLNRRANALLANGVELRDNQLVVPSEGLYLI
YSQVLFKGQGCPSTHVLLTHTISRIAVSFQTKVNLLSAIKSPCQRETPEG
AEAKPVVYEPIYLGGVFQLEKGDRLSAEINRPDYLDFAESGQVYFGIIAL
GGGGSSSRTPSDKPVAHVVANPQAEGQLQWLNRRANALLANGVELRDNQL
VVPSEGLYLIYSQVLFKGQGCPSTHVLLTHTISRIAVSFQTKVNLLSAIK
SPCQRETPEGAEAKPWYEPIYLGGVFQLEKGDRLSAEINRPDYLDFAESG
QVYFGIIAL

### Production and Purification of Human CD20 VHH-Based AFRs

[1255] Constructs were combined transiently expressed in the ExpiCHO expression system as follows:
[1256] (i) CD20 VHH-20*GGS-Fc3+Fc4-20*GGS-3*TNF_Y87F (AFR; see scheme 7B)

[1257] One week after transfection, supernatant was collected and cells removed by centrifugation. Recombinant proteins were purified from the supernatant using the Pierce Protein A spin plates (Thermo Fisher).

### Biological Activity on HEK-Dual Reporter Cell-Lines

[1258] HEK-Dual TNF-α cells (InvivoGen) were derived from the human embryonic kidney 293 cell line by stable co-transfection of two NF-κB-inducible reporter constructs. This allows the TNF-α-induced NF-κB activation by monitoring the activity of either secreted alkaline phosphatase (SEAP) or a secreted luciferase (Lucia). Parental cells were stably transfected with an expression vector encoding the human CD20 sequence. Stable transfected clones were selected in puromycin-containing medium. Parental HEK-Dual and HEK-Dual-hCD20 cells were seeded at 20,000 cells per 96-well and subsequently stimulated overnight with a serial dilution of Fc AFRs. Secreted Lucia luciferase activity was measured using QUANTI-Luc (InvivoGen). Data in the FIG. 65 illustrate that both cell-lines are comparably sensitive to wild type TNF, while the CD20 Fc AFR is more active on targeted cells (HEK-Dual-hCD20) compared to untargeted cells (HEK-Dual).

### Example 41: Bi-AcTakines

[1259] In this Example, we generated and evaluated a bi-AcTakine containing both IFNa2_R149A and hIL1b_Q148Q mutants and targeted via a human CD8 specific VHH (clone 1CDA65).

### Constructs:

Fc3-20*GGS-IL1b_Q 148G (P-1627)
(SEQ ID NO: 1555)
DKTHTCPPCPAPEAAGGPSVFLFPPKPKDTLMISRTPEVTCVVVDVSHED
PEVKFNWYVDGVEVHNAKTKPREEQYNSTYRVVSVLTVLHQDWLNGKEYK
CQVSNKALPAPIEKTISKAKGQPREPQVCTLPPSRDELTKNQVSLSCAVK
GFYPSDIAVEWESNGQPENNYKTTPPVLDSDGSFFLVSKLTVDKSRWQQG
NVFSCSVMHEALHNHYTQKSLSLSPGKGGSGGSGGSGGSGGSGGSGGSGG
SGGSGGSGGSGGSGGSGGSGGSGGSGGSGGSGGSGGSAPVRSLNCTLRDS
QQKSLVMSGPYELKALHLGGQDMEQQVVFSMSFVQGEESNDKIPVALGLK
EKNLYLSCVLKDDKPTLQLESVDPKNYPKKKMEKRFVFNKIEINNKLEFE
SAQFPNWYISTSQAENMPVFLGGTKGGQDITDFTMQFVSS
CD8 VHH-20*GGS-Fc4-20*GGS-IFNa2_R149A (P-1628)
(SEQ ID NO: 1556)
QVQLQESGGGLVQPGGSLRLSCAASGSIFSINVMGWYRQTPGKERELVAK
ITNFGITSYADSAQGRFTISRGNAKNTVYLQMNSLKPEDTAVYYCNLDTT
GWGPPPYQYWGQGTQVTVSSGGSGGSGGSGGSGGSGGSGGSGGSGGSGGS
GGSGGSGGSGGSGGSGGSGGSGGSGGSGGSDKTHTCPPCPAPEAAGGPSV
FLFPPKPKDTLMISRTPEVTCVVVDVSHEDPEVKFNWYVDGVEVHNAKTK
PREEQYNSTYRVVSVLTVLHQDWLNGKEYKCQVSNKALPAPIEKTISKAK
GQPREPQVYTLPPCRDELTKNQVSLWCLVKGFYPSDIAVEWESNGQPENN
YKTTPPVLDSDGSFFLYSKLTVDKSRWQQGNVFSCSVMHEALHNHYTQKS
LSLSPGKGGSGGSGGSGGSGGSGGSGGSGGSGGSGGSGGSGGSGGSGGSG
GSGGSGGSGGSGGSGGSCDLPQTHSLGSRRTLMLLAQMRKISLFSCLKDR
HDFGFPQEEFGNQFQKAETIPVLHEMIQQIFNLFSTKDSSAAWDETLLDK
FYTELYQQLNDLEACVIQGVGVEETPLMKEDSILAVRKYFQRITLYLKEK
KYSPCAWEVVRAEIMASFSLSTNLQESLRSKE

### Production and Purification of the Bi-AcTakine

[1261] Constructs Fc3-20*GGS-IL1b_Q148G and CD8 VHH-20*GGS-Fc4-20*GGS-IFNa2_R149A were combined and transiently expressed in the ExpiCHO expression system (Thermo Fisher) according to the manufacturer's guidelines. The resulting bi-AcTakine has a structure as outlined in FIG. 6A. One week after transfection, supernatant was collected, and cells removed by centrifugation. Recombinant proteins were purified from the supernatant using the Pierce Protein A spin plates (Thermo Fisher).

### Biological Activity

[1262] The HL116 reporter cell-line was used to test the bi-AcTakine for IFN-like signaling. Parental HL116 cells were transfected with an expression vector encoding the human CD8 sequence. Stable transfected clones were selected in G418-containing medium. Parental HL116 and HL116-hCD8 cells were seeded overnight at 20,000 cells per 96-well and subsequently stimulated with a serial dilution of Fc AFNs for 6 hours. Luciferase activity was measured in cell lysates. Data in the FIG. 66 illustrate that both cell-lines are comparably sensitive to wild type IFNα2, while the bi-AcTakine is much more active on targeted cells (HL116-hCD8) compared to untargeted cells (parental H L116).

[1263] IL-1β-like signaling of the bi-AcTakine was measured on HEK-BIue™ IL-13 Cells (InvivoGen) with an NF-κB/AP-1-inducible SEAP (secreted alkaline phosphatase) reporter. Therefore, cells were transiently transfected with an empty vector or an expression-plasmid encoding human CD8. 36 hours post transfection, cells were resuspended and stimulated overnight with a serial dilution wild type IL-13 or bi-AcTakine. SEAP was measured using the Phospha-Light SEAP Reporter Gene Assay System (ThermoFisher) according to the manufacturer's guidelines. Data in FIG. 67 illustrate that MOCK or CD8 transfected HEK-Blue cells are comparably sensitive to wild type IL-1β, while the bi-AcTakine is specifically capable to induce signaling in target (here CD8) expressing cells and not in MOCK transfected cells.

### Example 42: Clec9A Fc AFNs Based on Human IgG4

[1264] In this Example, we designed and evaluated Clec9A-targeted (via VHH R1CHCL50) AFNs based on human IgG1 or human IgG4. The human IgG4 used has a S228P mutation to avoid in vivo exchange of half-molecules. In addition, either a knob or hole was engineered in the respective Fc-chains.

### Constructs:

R1CHCL50-20*GGS-Fc3 (P-1451)
(SEQ ID NO: 1557)
QVQLVESGGGLVHPGGSLRLSCAASGSFSSINVMGWYRQAPGKERELVAR
ITNLGLPNYADSVTGRFTISRDNAKNTVYLQMNSLKPEDTAVYYCYLVAL
KAEYWGQGTQVTVSSGGSGGSGGSGGSGGSGGSGGSGGSGGSGGSGGSGG
SGGSGGSGGSGGSGGSGGSGGSGGSDKTHTCPPCPAPEAAGGPSVFLFPP
KPKDTLMISRTPEVTCVVVDVSHEDPEVKFNWYVDGVEVHNAKTKPREEQ
YNSTYRVVSVLTVLHQDWLNGKEYKCQVSNKALPAPIEKTISKAKGQPRE
PQVCTLPPSRDELTKNQVSLSCAVKGFYPSDIAVEWESNGQPENNYKTTP
PVLDSDGSFFLVSKLTVDKSRWQQGNVFSCSVMHEALHNHYTQKSLSLSP
GK
Fc4-20*GGS-IFNa2_R149A (P-1414)
(SEQ ID NO: 1558)
DKTHTCPPCPAPEAAGGPSVFLFPPKPKDTLMISRTPEVTCVVVDVSHED
PEVKFNWYVDGVEVHNAKTKPREEQYNSTYRVVSVLTVLHQDWLNGKEYK
CQVSNKALPAPIEKTISKAKGQPREPQVYTLPPCRDELTKNQVSLWCLVK
GFYPSDIAVEWESNGQPENNYKTTPPVLDSDGSFFLYSKLTVDKSRWQQG
NVFSCSVMHEALHNHYTQKSLSLSPGKGGSGGSGGSGGSGGSGGSGGSGG
SGGSGGSGGSGGSGGSGGSGGSGGSGGSGGSGGSGGSCDLPQTHSLGSRR
TLMLLAQMRKISLFSCLKDRHDFGFPQEEFGNQFQKAETIPVLHEMIQQI
FNLFSTKDSSAAWDETLLDKFYTELYQQLNDLEACVIQGVGVEETPLMKE
DSILAVRKYFQRITLYLKEKKYSPCAWEVVRAEIMASFSLSTNLQESLRS
KE
R1CHCL50-20*GGS-hIgG4 Fc (P-1754) (hole)
(SEQ ID NO: 1559)
SQVQLVESGGGLVHPGGSLRLSCAASGSFSSINVMGWYRQAPGKERELVA
RITNLGLPNYADSVTGRFTISRDNAKNTVYLQMNSLKPEDTAVYYCYLVA
LKAEYWGQGTQVTVSSGGSGGSGGSGGSGGSGGSGGSGGSGGSGGSGGSG
GSGGSGGSGGSGGSGGSGGSGGSGGSDKTHTCPPCPAPEFLGGPSVFLFP
PKPKDTLMISRTPEVTCVVVDVSQEDPEVQFNWYVDGVEVHNAKTKPREE
QFNSTYRVVSVLTVLHQDWLNGKEYKCKVSNKGLPSSIEKTISKAKGQPR
EPQVYTLPPSQEEMTKNQVSLSCAVKGFYPSDIAVEWESNGQPENNYKTT
PPVLDSDGSFFLVSRLTVDKSRWQEGNVFSCSVMHEALHNHYTQKSLSLS
LGK
hIgG4 Fc-20*GGS-IFNa2_R149A (P-1755) (knob)
(SEQ ID NO: 1560)
DKTHTCPPCPAPEFLGGPSVFLFPPKPKDTLMISRTPEVTCVVVDVSQED
PEVQFNWYVDGVEVHNAKTKPREEQFNSTYRWSVLTVLHQDWLNGKEYKC
KVSNKGLPSSIEKTISKAKGQPREPQVYTLPPSQEEMTKNQVSLWCLVKG
FYPSDIAVEWESNGQPENNYKTTPPVLDSDGSFFLYSRLTVDKSRWQEGN
VFSCSVMHEALHNHYTQKSLSLSLGKGGSGGSGGSGGSGGSGGSGGSGGS
GGSGGSGGSGGSGGSGGSGGSGGSGGSGGSGGSGGSCDLPQTHSLGSRRT
LMLLAQMRKISLFSCLKDRHDFGFPQEEFGNQFQKAETIPVLHEMIQQIF
NLFSTKDSSAAWDETLLDKFYTELYQQLNDLEACVIQGVGVEETPLMKED
SILAVRKYFQRITLYLKEKKYSPCAWEVVRAEIMASFSLSTNLQESLRSK
E

### Production and Purification of Clec9A and PD-L1 VHH-Based AFN

[1266] The following combinations were transiently transfected in ExpiCHO cells:
[1267] (i) R1CHCL50-Fc3+Fc4-IFNa2_R149A (IgG1 based AFN)
[1268] (ii) R1CHCL50-hIgG4 Fc+hIgG4 Fc-IFNa2_R149A (IgG4 based AFN)

[1269] One week after transfection, supernatant was collected and cells removed by centrifugation. The resulting AcTakines have a structure as outlined in FIG. 7B. Recombinant proteins were purified from the supernatant using the Pierce Protein A spin plates (Thermo Fisher).

### Biological Activity on HL116 Reporter Cell-Lines

[1270] The HL116 clone is derived from the human HT1080 cell line (ATCC CCL-121). It contains the firefly luciferase gene controlled by the IFN-inducible 6-16 promoter. Clec9A targeting was tested using the stable HL116-hClec9A cell-line. Parental and derived cells were seeded overnight at 20,000 cells per 96-well and subsequently stimulated with a serial dilution of Fc AFNs for 6 hours. Luciferase activity was measured in cell lysates. Data in FIG. 68 show that both HL116 and HL116-hClec9A respond similarly to wild type IFNa2. Furthermore, Clec9A targeted Fc AFNs based on human IgG1 or IgG4 have comparable EC50 values on targeted HL116-hClec9A, while signaling on parental cells could only be observed at very high concentrations.

### Example 43: Comparative PK Between Chimera Lacking an Fc and the Present PC-Based Chimeric Protein Complexes

[1271] This Example is related to the PK (pharmacokinetics) of an AFN without Fc (3LEC89-20*GGS-huIFNa2_R149A-his6) in mice. This chimera has the sequence of:

P-602 sequence
(SEQ ID NO: 1561)
QVQLQESGGGLVQPGGSLRLSCAASGRIFSVNAMGWYRQAPGKQRELVAA
ITNQGAPTYADSVKGRFTISRDNAGNTVYLQMNSLRPEDTAVYYCKAFTR
GDDYWGQGTQVTVSSVDGGSGGSGGSGGSGGSGGSRSGGSGGSGGSGGSG
GSGGSGGSGGSGGSGGSGGSGGSGGSAAAMCDLPQTHSLGSRRTLMLLAQ
MRRISLFSCLKDRHDFGFPQEEFGNQFQKAETIPVLHEMIQQIFNLFSTK
DSSAAWDETLLDKFYTELYQQLNDLEACVIQGVGVTETPLMKEDSILAVR
KYFQRITLYLKEKKYSPCAWEVVRAEIMASFSLSTNLQESLRSKELEHHH
HHH

[1272] Nine animals were dosed intravenously at 3 mg/kg. K-EDTA blood was taken from a first group of 3 mice at 5 minutes and 1 hour, from a second group of 3 mice at 15 minutes and 3 hours and finally from the last group at 8 hours. The concentration in the plasma samples was measured using the same ELISA as described for the Fc-fusion proteins. The measured concentration (FIG. 69) show a fast clearing of this type of molecules resulting in a concentration below detection limit (0.12 μg/ml) at the 8-hour time point. The estimated terminal half-life is in the range of 2 hours.

[1273] A comparable study with the same IFN and anti-Clec9A components—but now in the Fc-format (i.e. replacing the GGS linker with the described Fc) was described in Example 3 (See FIG. 24). The half-life was dramatically increased—to multiple days (FIG. 24).

### Example 44: scFv PD-L1-Based Fc AFNs

[1274] In this Example, PD-L1 (programmed death-ligand 1) targeted Fc AFNs based on a human PD-L1 specific scFv for targeting to tumour cells or activated immune cells is generated and evaluated.

[1275] Several constructs including scFv directed to PD-L1 as the targeting agent and wild type IFNα2 as the signaling agent are constructed. Some illustrative configurations of these PD-L1 targeted constructs are shown, e.g., in FIGS. 4A-D, where the targeting agent is a scFv directed towards PD-L1 and signaling agent is wild type IFNα2.

Production and Purification of PD-L1 scFv-Based AFN

[1276] The constructs are produced in ExpiCHO cells by transient transfection of the corresponding constructs according to the manufacturer's guidelines. One week after transfection, supernatant is collected and cells removed by centrifugation. Recombinant proteins are purified from the supernatant using the Pierce Protein A spin plates (Thermo Fisher).

### Biological Activity on HL116 Reporter Cell-Lines

[1277] Biological activity of these constructs are studied in HL116 reporter cell-lines. The HL116 clone is derived from the human HT1080 cell line (ATCC CCL-121). It contains the firefly luciferase gene controlled by the IFN-inducible 6-16 promoter. Parental HL116 cells express PD-L1 endogenously, so targeting is evaluated in the absence or presence of an excess of the corresponding free PD-L1 scFv.

[1278] Construction and characterization of IFNα-armed anti-PD-L1 is performed. Flow cytometry is used to show binding of indicated protein in IFNAR1−/−A20 cells and PD-L1−/−A20 cells at the concentration of 80 nM.

[1279] Numbers indicate the mean fluorescent intensity (MFI). The bioactivity of scFv PD-L1-based Fc AFNs was measured by an anti-viral infection biological assay. L929 cells were cultured with each protein overnight before being infected with VSV-GFP virus. After another 30 h of culture, the percentage of virus-infected cells was determined by flow cytometry.

[1280] Balb/c mice (n=5) are inoculated with 3×10⁶ A20 cells. After tumor is established, mice are treated with 20 μg of control, anti-PD-L1, IFNα-Fc, or scFv PD-L1-based Fc AFNs by i.t. or i.v. (day 11 and 15) injection.

[1281] Tumor size is measured twice per week. C57BL/6 mice (n=4-8) are inoculated with 5×10⁵ MC38 cells. Mice are treated i.v. with 25 μg control or scFv PD-L1-based Fc AFNs on days 14 and 18. Mice are injected i.v. with 25 μg of indicated protein. Protein concentrations in tumor tissues or serum at different time points is measured by ELISA.

### EQUIVALENTS

[1282] While the invention has been described in connection with specific embodiments thereof, it will be understood that it is capable of further modifications and this application is intended to cover any variations, uses, or adaptations of the invention following, in general, the principles of the invention and including such departures from the present disclosure as come within known or customary practice within the art to which the invention pertains and as may be applied to the essential features hereinbefore set forth and as follows in the scope of the appended claims.

[1283] Those skilled in the art will recognize, or be able to ascertain, using no more than routine experimentation, numerous equivalents to the specific embodiments described specifically herein. Such equivalents are intended to be encompassed in the scope of the following claims.

### INCORPORATION BY REFERENCE

[1284] All patents and publications referenced herein are hereby incorporated by reference in their entireties.

[1285] The publications discussed herein are provided solely for their disclosure prior to the filing date of the present application. Nothing herein is to be construed as an admission that the present invention is not entitled to antedate such publication by virtue of prior invention.

[1286] As used herein, all headings are simply for organization and are not intended to limit the disclosure in any manner. The content of any individual section may be equally applicable to all sections

What is claimed is:

1. An Fc-based chimeric protein complex comprising:
(a) a targeting moiety comprising a recognition domain that recognizes and/or binds to a target;
(b) a signaling agent, wherein the signaling agent is:
i) a wild type signaling agent; or
ii) a modified signaling agent that has one or more mutations that confer improved safety relative to the wild type signaling agent; and
(c) an Fc domain, the Fc domain comprising an Fc chain and optionally having one or more mutations that reduce or eliminate one or more effector functions of the Fc domain, promotes Fc chain pairing of the Fc domain, and/or stabilizes a hinge region in the Fc domain.

2. The Fc-based chimeric protein complex of claim 1, further comprising one or more linkers.

3. The Fc-based chimeric protein complex of claim 1 or 2, wherein the Fc domain is selected from IgG, IgA, IgD, IgM, or IgE.

4. The Fc-based chimeric protein complex of claim 3, wherein the IgG is selected from IgG1, IgG2, IgG3, or IgG4.

5. The Fc-based chimeric protein complex of claim 3, wherein the Fc domain is selected from human IgG, IgA, IgD, IgM, or IgE.

6. The Fc-based chimeric protein complex of claim 5, wherein the human IgG is selected from human IgG1, IgG2, IgG3, or IgG4.

7. The Fc-based chimeric protein complex of any one of claims 1-6, wherein the signaling agent is a modified signaling agent and has reduced affinity or activity at the signaling agent's receptor relative to a wild type signaling agent.

8. The Fc-based chimeric protein complex of claim 7, wherein the signaling agent is a modified signaling agent and the targeting moiety restores the modified signaling agent's affinity or activity at the signaling agent's receptor.

9. The Fc-based chimeric protein complex of any one of claims 1-8, wherein the Fc chain pairing is promoted by ionic pairing and/or a knob-in-hole pairing.

10. The Fc-based chimeric protein complex of any one of claims 1-9, wherein the one or more mutations to the Fc domain results in an ionic pairing between the Fc chains in the Fc domain.

11. The Fc-based chimeric protein complex of any one of claims 1-10, wherein the one or more mutations to the Fc domain results in a knob-in-hole pairing of the Fc domain.

12. The Fc-based chimeric protein complex of any one of claims 1-11, wherein the one or more mutations to the Fc domain results in the reduction or elimination of the effector function of the Fc domain.

13. The Fc-based chimeric protein complex of any one of claims 1-12, wherein the targeting moiety comprise a recognition domain that recognizes and/or binds an antigen or receptor on a tumor cell, and/or tumor stroma, and/or ECM, and/or immune cell.

14. The Fc-based chimeric protein complex of claim 13, wherein the immune cell is selected from a T cell, a B cell, a dendritic cell, a macrophage, a neutrophil, and a NK cell.

15. The Fc-based chimeric protein complex of any one of the above claims, wherein the targeting moiety comprises a single-domain antibody, a recombinant heavy-chain-only antibody (VHH), a single-chain antibody (scFv), a shark heavy-chain-only antibody (VNAR), a microprotein, a darpin, an anticalin, an adnectin, an aptamer, a Fv, a Fab, a Fab′, a F(ab′)₂, a peptide mimetic molecule, a natural ligand for a receptor, or a synthetic molecule.

16. The Fc-based chimeric protein complex of any one of the above claims, wherein the targeting moiety comprises a VHH.

17. The Fc-based chimeric protein complex of any one of the above claims, wherein the targeting moiety recognizes and/or binds to its target without substantially neutralizing the target's activity or wherein the targeting moiety recognizes and/or binds to its target and substantially neutralizes the target's activity.

18. The Fc-based chimeric protein complex of any one of the above claims, wherein the targeting moiety directly or indirectly recruits immune cells to tumor cells or to the tumor microenvironment.

19. The Fc-based chimeric protein complex of any one of the above claims, wherein the targeting moiety enhances antigen presentation.

20. The Fc-based chimeric protein complex of any one of the above claims, wherein the targeting moiety enhances tumor antigen presentation, optionally by dendritic cells.

21. The Fc-based chimeric protein complex of any one of the above claims, wherein the targeting moiety binds to one of the following targets: CD8, CD13, CD20, Clec9A, Clec4c, PD-1, PD-L1, PD-L2, SIRP1α, FAP, XCR1, tenascin CA1, Flt3, or an ECM protein.

22. The Fc-based chimeric protein complex of any one of the above claims, wherein the signaling agent is a modified signaling agent and the mutations in the modified signaling agent allow for attenuation of activity.

23. The Fc-based chimeric protein complex of claim 22, wherein agonistic or antagonistic activity is attenuated.

24. The Fc-based chimeric protein complex of any one of the above claims, wherein the signaling agent is a modified signaling agent and the modified signaling agent is selected from an interferon, an interleukin, and a tumor necrosis factor.

25. The Fc-based chimeric protein complex of any one of the above claims, wherein the signaling agent is a modified signaling agent and the modified signaling agent is selected from human: IFNα2, IFNα1, IFNβ, IFNγ, consensus interferon, TNF, TNFR, TGF-α, TGF-β, VEGF, EGF, PDGF, FGF, TRAIL, IL-1β, IL-2, IL-3, IL-4, IL-6, IL-10, IL-12, IL-13, IL-15, IL-18, IL-33, IGF-1, or EPO.

26. The Fc-based chimeric protein complex of claim 25, wherein the human IFNα2 comprises one or more mutations selected from R33A, T106X₃, R120E, R144X₁ A145X₂, M148A, R149A, and L153A and with respect to the amino acid sequence of SEQ ID NO: 1 or 2, wherein X₁ is selected from A, S, T, Y, L, and I, wherein X₂ is selected from G, H, Y, K, and D, and wherein X₃ is selected from A and E.

27. The Fc-based chimeric protein complex of claim 25, wherein the human IFNβ comprises one or more mutations selected from W22G, R27G, L32A, L32G, R35A, R35G, V148G, L151G, R152A, and R152G with respect to the amino acid sequence of SEQ ID NO: 3.

28. The Fc-based chimeric protein complex of claim 25, wherein the human IL-1β comprises one or more mutations selected from A117G/P118G, R120G, R120A, L122A, T125G/L126G, R127G, Q130A, Q130W, Q131G, K132A, S137G/Q138Y, L145G, H146A, H146G, H146E, H146N, H146R, L145A/L147A, Q148E, Q148G, Q148L, Q148G/Q150G, Q150G/D151A, M152G, F162A, F162A/Q164E, F166A, Q164E/E167K, N169G/D170G, I172A, V174A, K208E, K209A, K209D, K209A/K210A, K219S, K219Q, E221S, E221K, E221S/N224A, N224S/K225S, E244K, and N245Q with respect to the amino acid sequence of SEQ ID NO: 17.

29. The Fc-based chimeric protein complex of claim 25, wherein the human IL-2 comprises one or more mutations selected from R38A, F42A, Y45A, E62A, N88R, N88I, N88G, D20H, Q126L, Q126F, D109, and C125 with respect to the amino acid sequence of SEQ ID NO: 18.

30. The Fc-based chimeric protein complex of claim 25, wherein the human TNFα comprises one or more mutations selected from R32G, N34G, Q67G, H73G, L75G, L75A, L75S, T77A, S86G, Y870, Y87L, Y87A, Y87F, V91G, V91A, I97A, I97Q, I97S, T105G, P106G, A109Y, P113G, Y115G, Y115A, E127G, N137G, D143N, A145G, A145T, and Y87Q/I97A with respect to the amino acid sequence of SEQ ID NO: 14.

31. The Fc-based chimeric protein complex of any one of claims 1-30, wherein the Fc domain is homodimeric.

32. The Fc-based chimeric protein complex of any one of claims 1, 2, and 7-30, wherein the Fc domain is heterodimeric.

33. The Fc-based chimeric protein complex of claim 25, wherein the signaling agent is a modified IFNα2, optionally having a R149A mutation with respect to the amino acid sequence of SEQ ID NO: 1 or 2.

34. The Fc-based chimeric protein complex of claim 26 or 33, wherein the targeting moiety binds to Clec9A and the signaling agent is modified IFNα2, optionally having one or more of the following mutations: R33A, R144A, R144I, R144L, R144S, R144T, R144Y, A145D, A145G, A145H, A145K, A145Y, M148A, and L153A.

35. The Fc-based chimeric protein complex of claim 33, wherein the targeting moiety binds to PD-L1 and the signaling agent is modified IFNα2.

36. The Fc-based chimeric protein complex of claim 33, wherein the targeting moiety binds to PD-1 and the signaling agent is modified IFNα2.

37. The Fc-based chimeric protein complex of claim 33, wherein:
(i) the targeting moiety binds to Clec4c and the signaling agent is modified IFNα2, or
(ii) the targeting moiety binds to XCR1 and the signaling agent is modified IFNα2.

38. The Fc-based chimeric protein complex of claim 33, wherein the targeting moiety binds to CD20 and the signaling agent is modified IFNα2.

39. The Fc-based chimeric protein complex of claim 33, wherein the targeting moiety binds to CD13 and the signaling agent is modified IFNα2.

40. The Fc-based chimeric protein complex of claim 33, wherein the targeting moiety binds to FAP and the signaling agent is modified IFNα2.

41. The Fc-based chimeric protein complex of claim 33, wherein the targeting moiety binds to CD8 and the signaling agent is modified IFNα2.

42. The Fc-based chimeric protein complex of claim 33, wherein the targeting moiety binds to Flt3 and optionally comprises the extracellular domain of Flt3L, or a functional portion thereof and the signaling agent is modified IFNα2.

43. The Fc-based chimeric protein complex of claim 21, wherein the targeting moiety is an scFv against PD-L1 and the signaling agent is wild type IFNα2.

44. The Fc-based chimeric protein complex of claim 33, wherein the targeting moiety comprises the extracellular domain of PD-L1, or a functional portion thereof, and the signaling agent is modified IFNα2.

45. The Fc-based chimeric protein complex of claim 33, wherein the targeting moiety comprises the extracellular domain of PD-1, or a functional portion thereof, and the signaling agent is modified IFNα2.

46. The Fc-based chimeric protein complex of claim 33, wherein the targeting moiety comprises the NGR peptide and the signaling agent is modified IFNα2.

47. The Fc-based chimeric protein complex of claim 25, wherein the signaling agent is a wildtype IFNβ or a modified IFNβ.

48. The Fc-based chimeric protein complex of claim 47, wherein the targeting moiety binds to Clec9A and the signaling agent is modified IFNβ.

49. The Fc-based chimeric protein complex of claim 25, wherein the signaling agent is a wildtype IL-1β or a modified IL-1β.

50. The Fc-based chimeric protein complex of claim 49, wherein the targeting moiety binds to CD8 and the signaling agent is modified IL-1β.

51. The Fc-based chimeric protein complex of claim 25, wherein the signaling agent is a wildtype TNF or a modified TNF.

52. The Fc-based chimeric protein complex of claim 51, wherein the targeting moiety binds to CD20 and the signaling agent is modified TNF.

53. The Fc-based chimeric protein complex of any one of claims 1-52, wherein the chimeric protein complex further comprises a second targeting moiety.

54. The Fc-based chimeric protein complex of claim 53, wherein the second targeting moiety binds to one of the following targets: CD8, CD13, CD20, Clec9A, Clec4c, PD-1, PD-L1, PD-L2, SIRP1α, FAP, XCR1, tenascin CA1, Flt3, or an ECM protein.

55. The Fc-based chimeric protein complex of any one of claims 1-54, wherein the chimeric protein complex further comprises a second signaling agent.

56. The Fc-based chimeric protein complex of claim 55, wherein the second signaling agent is a wild type or modified signaling agent.

57. The Fc-based chimeric protein complex of claim 56, wherein the second signaling agent is selected from human: IFNα2, IFNα1, IFNβ, IFNγ, consensus interferon, TNF, TNFR, TGF-α, TGF-β, VEGF, EGF, PDGF, FGF, TRAIL, IL-1β, IL-2, IL-3, IL-4, IL-6, IL-10, IL-12, IL-13, IL-15, IL-18, IL-33, IGF-1, or EPO.

58. A method for treating or preventing cancer, comprising administering to a patient in need thereof an effective amount of the Fc-based chimeric protein complex of any one of claims 1-57.

59. A use of the Fc-based chimeric protein complex of any one of claims 1-57 for treating or preventing cancer.

60. A use of the Fc-based chimeric protein complex of any one of claims 1-57 for the preparation of a medicament for the treatment of prevention of cancer.

61. The method of claim 58 or the use of claim 59 or claim 60, wherein the cancer is selected form one or more of basal cell carcinoma, biliary tract cancer; bladder cancer; bone cancer; brain and central nervous system cancer; breast cancer; cancer of the peritoneum; cervical cancer; choriocarcinoma; colon and rectum cancer; connective tissue cancer; cancer of the digestive system; endometrial cancer; esophageal cancer; eye cancer; cancer of the head and neck; gastric cancer (including gastrointestinal cancer); glioblastoma; hepatic carcinoma; hepatoma; intra-epithelial neoplasm; kidney or renal cancer; larynx cancer; leukemia; liver cancer; lung cancer (e.g., small-cell lung cancer, non-small cell lung cancer, adenocarcinoma of the lung, and squamous carcinoma of the lung); melanoma; myeloma; neuroblastoma; oral cavity cancer (lip, tongue, mouth, and pharynx); ovarian cancer; pancreatic cancer; prostate cancer; retinoblastoma; rhabdomyosarcoma; rectal cancer; cancer of the respiratory system; salivary gland carcinoma; sarcoma; skin cancer; squamous cell cancer; stomach cancer; testicular cancer; thyroid cancer; uterine or endometrial cancer; cancer of the urinary system; vulval cancer; lymphoma including Hodgkin's and non-Hodgkin's lymphoma, as well as B-cell lymphoma (including low grade/follicular non-Hodgkin's lymphoma (NHL); small lymphocytic (SL) NHL; intermediate grade/follicular NHL; intermediate grade diffuse NHL; high grade immunoblastic NHL; high grade lymphoblastic NHL; high grade small non-cleaved cell NHL; bulky disease NHL; mantle cell lymphoma; AIDS-related lymphoma; and Waldenstrom's Macroglobulinemia; chronic lymphocytic leukemia (CLL); acute lymphoblastic leukemia (ALL); Hairy cell leukemia; chronic myeloblastic leukemia; as well as other carcinomas and sarcomas; and post-transplant lymphoproliferative disorder (PTLD), as well as abnormal vascular proliferation associated with phakomatoses; edema (e.g. that associated with brain tumors); and Meigs' syndrome.

62. A method for treating or preventing an autoimmune disease, neurodegenerative disease, metabolic disease, and/or cardiovascular disease, comprising administering to a patient in need thereof an effective amount of effective amount of the Fc-based chimeric protein complex of any one of claims 1-57.

63. A use of the Fc-based chimeric protein complex of any one of claims 1-57 for treating or preventing an autoimmune disease, neurodegenerative disease, metabolic disease, and/or cardiovascular disease.

64. A use of the Fc-based chimeric protein complex of any one of claims 1-57 for the preparation of a medicament for the treatment of prevention of an autoimmune disease, neurodegenerative disease, metabolic disease, and/or cardiovascular disease.

65. The method of claim 62 or the use of claim 63 or claim 64, wherein the autoimmune disease, neurodegenerative disease, metabolic disease, and/or cardiovascular disease is selected from multiple sclerosis, diabetes mellitus, lupus, celiac disease, Crohn's disease, ulcerative colitis, Guillain-Barre syndrome, scleroderms, Goodpasture's syndrome, Wegener's granulomatosis, autoimmune epilepsy, Rasmussen's encephalitis, Primary biliary sclerosis, Sclerosing cholangitis, Autoimmune hepatitis, Addison's disease, Hashimoto's thyroiditis, Fibromyalgia, Menier's syndrome; transplantation rejection (e.g., prevention of allograft rejection) pernicious anemia, rheumatoid arthritis, systemic lupus erythematosus, dermatomyositis, Sjogren's syndrome, lupus erythematosus, myasthenia gravis, Reiter's syndrome, and Grave's disease.

66. An Fc-based chimeric protein complex where the complex is a homodimer comprising:
(a) a targeting moiety comprising a recognition domain that recognizes and/or binds to a target;
(b) a signaling agent, wherein the signaling agent is:
i) a wild type signaling agent; or
ii) a modified signaling agent that has one or more mutations that confer improved safety relative to the wild type signaling agent; and
(c) an Fc domain, the Fc domain comprising an Fc chain and optionally having one or more mutations that reduce or eliminate one or more effector functions of the Fc domain and/or stabilizes a hinge region in the Fc domain.

67. The Fc-based chimeric protein complex of claim 66, further comprising one or more linkers.

68. The Fc-based chimeric protein complex of any one of claim 66 or 67, wherein the Fc domain is selected from IgG, IgA, IgD, IgM, or IgE.

69. The Fc-based chimeric protein complex of claim 68, wherein the IgG is selected from IgG1, IgG2, IgG3, or IgG4.

70. The Fc-based chimeric protein complex of claim 68, wherein the Fc domain is selected from human IgG, IgA, IgD, IgM, or IgE.

71. The Fc-based chimeric protein complex of claim 70, wherein the human IgG is selected from human IgG1, IgG2, IgG3, or IgG4.

72. The Fc-based chimeric protein complex of any one of claims 66-71, wherein the signaling agent is a modified signaling agent and the modified signaling agent has reduced affinity or activity at the signaling agent's receptor relative to a wild type signaling agent.

73. The Fc-based chimeric protein complex of claim 72, wherein signaling agent is a modified signaling agent and the targeting moiety restores the modified signaling agent's affinity or activity at the signaling agent's receptor.

74. The Fc-based chimeric protein complex of any one of claims 66-73, wherein the one or more mutations to the Fc domain results in the reduction or elimination of the effector function of the Fc domain.

75. The Fc-based chimeric protein complex of any one of claims 66-74, wherein the targeting moiety comprise a recognition domain that recognizes and/or binds an antigen or receptor on a tumor cell, and/or tumor stroma, and/or ECM, and/or immune cell.

76. The Fc-based chimeric protein complex of claim 75, wherein the immune cell is selected from a T cell, a B cell, a dendritic cell, a macrophage, a neutrophil, and a NK cell.

77. The Fc-based chimeric protein complex of any one of claims 66-76, wherein the targeting moiety comprises a single-domain antibody, a recombinant heavy-chain-only antibody (VHH), a single-chain antibody (scFv), a shark heavy-chain-only antibody (VNAR), a microprotein, a darpin, an anticalin, an adnectin, an aptamer, a Fv, a Fab, a Fab′, a F(ab′)₂, a peptide mimetic molecule, a natural ligand for a receptor, or a synthetic molecule.

78. The Fc-based chimeric protein complex of any one of claims 66-77, wherein the targeting moiety comprises a VHH.

79. The Fc-based chimeric protein complex of any one of claims 66-78, wherein the targeting moiety recognizes and/or binds to its target without substantially neutralizing the target's activity or wherein the targeting moiety recognizes and/or binds to its target and substantially neutralizes the target's activity.

80. The Fc-based chimeric protein complex of any one of claims 66-79, wherein the targeting moiety directly or indirectly recruits immune cells to tumor cells or to the tumor microenvironment.

81. The Fc-based chimeric protein complex of any one of claims 66-80, wherein the targeting moiety enhances antigen presentation.

82. The Fc-based chimeric protein complex of any one of claims 66-81, wherein the targeting moiety enhances tumor antigen presentation, optionally by dendritic cells.

83. The Fc-based chimeric protein complex of any one of claims 66-82, wherein the targeting moiety binds to one of the following targets: CD8, CD13, CD20, Clec9A, Clec4c, PD-1, PD-L1, PD-L2, SIRP1α, FAP, XCR1, tenascin CA1, Flt3, or an ECM protein.

84. The Fc-based chimeric protein complex of any one of claims 66-83, wherein the signaling agent is a modified signaling agent and the mutations in the modified signaling agent allow for attenuation of activity.

85. The Fc-based chimeric protein complex of claim 84, wherein agonistic or antagonistic activity is attenuated.

86. The Fc-based chimeric protein complex of any one of claims 66-85, wherein the modified signaling agent is selected from an interferon, an interleukin, and a tumor necrosis factor.

87. The Fc-based chimeric protein complex of any one of claims 66-86, wherein the modified signaling agent is selected from human: IFNα2, IFNα1, IFNβ, IFNγ, consensus interferon, TNF, TNFR, TGF-α, TGF-β, VEGF, EGF, PDGF, FGF, TRAIL, IL-1β, IL-2, IL-3, IL-4, IL-6, IL-10, IL-12, IL-13, IL-15, IL-18, IL-33, IGF-1, or EPO.

88. The Fc-based chimeric protein complex of claim 87, wherein the human IFNα2 comprises one or more mutations selected from R33A, T106X₃, R120E, R144X₁ A145X₂, M148A, R149A, and L153A and with respect to the amino acid sequence of SEQ ID NO: 1 or 2, wherein X₁ is selected from A, S, T, Y, L, and I, wherein X₂ is selected from G, H, Y, K, and D, and wherein X₃ is selected from A and E.

89. The Fc-based chimeric protein complex of claim 87, wherein the human IFNβ comprises one or more mutations selected from W22G, R27G, L32A, L32G, R35A, R35G, V148G, L151G, R152A, and R152G with respect to the amino acid sequence of SEQ ID NO: 3.

90. The Fc-based chimeric protein complex of claim 87, wherein the human IL-13 comprises one or more mutations selected from A117G/P118G, R120G, R120A, L122A, T125G/L126G, R127G, Q130A, Q130W, Q131G, K132A, S137G/Q138Y, L145G, H146A, H146G, H146E, H146N, H146R, L145A/L147A, Q148E, Q148G, Q148L, Q148G/Q150G, Q150G/D151A, M152G, F162A, F162A/Q164E, F166A, Q164E/E167K, N169G/D170G, I172A, V174A, K208E, K209A, K209D, K209A/K210A, K219S, K219Q, E221S, E221K, E221S/N224A, N224S/K225S, E244K, and N245Q with respect to the amino acid sequence of SEQ ID NO: 17.

91. The Fc-based chimeric protein complex of claim 87, wherein the human IL-2 comprises one or more mutations selected from R38A, F42A, Y45A, E62A, N88R, N88I, N88G, D20H, Q126L, Q126F, D109, and C125 with respect to the amino acid sequence of SEQ ID NO: 18.

92. The Fc-based chimeric protein complex of claim 87, wherein the human TNFα comprises one or more mutations selected from R32G, N34G, Q67G, H73G, L75G, L75A, L75S, T77A, S86G, Y870, Y87L, Y87A, Y87F, V91G, V91A, I97A, I97Q, I97S, T105G, P106G, A109Y, P113G, Y115G, Y115A, E127G, N137G, D143N, A145G, A145T, and Y87Q/I97A with respect to the amino acid sequence of SEQ ID NO: 14.

93. The Fc-based chimeric protein complex of claim 87, wherein the signaling agent is a modified IFNα2, optionally with a R149A mutation with respect to the amino acid sequence of SEQ ID NO: 1 or 2.

94. The Fc-based chimeric protein complex of claim 88 or 93, wherein the targeting moiety binds to Clec9A and the signaling agent is modified IFNα2, optionally having one or more of the following mutations: R33A, R144A, R144I, R144L, R144S, R144T, R144Y, A145D, A145G, A145H, A145K, A145Y, M148A, and L153A.

95. The Fc-based chimeric protein complex of claim 93, wherein the targeting moiety binds to PD-L1 and the signaling agent is modified IFNα2.

96. The Fc-based chimeric protein complex of claim 93, wherein the targeting moiety binds to PD-1 and the signaling agent is modified IFNα2.

97. The Fc-based chimeric protein complex of claim 93, wherein:
(i) the targeting moiety binds to Clec4c and the signaling agent is modified IFNα2, or
(ii) the targeting moiety binds to XCR1 and the signaling agent is modified IFNα2.

98. The Fc-based chimeric protein complex of claim 93, wherein the targeting moiety binds to CD20 and the signaling agent is modified IFNα2.

99. The Fc-based chimeric protein complex of claim 93, wherein the targeting moiety binds to CD13 and the signaling agent is modified IFNα2.

100. The Fc-based chimeric protein complex of claim 93, wherein the targeting moiety binds to FAP and the signaling agent is modified IFNα2.

101. The Fc-based chimeric protein complex of claim 93, wherein the targeting moiety binds to CD8 and the signaling agent is modified IFNα2.

102. The Fc-based chimeric protein complex of claim 93, wherein the targeting moiety binds to Flt3 and optionally comprises the extracellular domain of Flt3L, or a functional portion thereof, and the signaling agent is modified IFNα2.

103. The Fc-based chimeric protein complex of claim 83, wherein the targeting moiety is an scFv against PD-L1 and the signaling agent is wild type IFNα2.

104. The Fc-based chimeric protein complex of claim 93, wherein the targeting moiety comprises the extracellular domain of PD-L1, or a functional portion thereof, and the signaling agent is modified IFNα2.

105. The Fc-based chimeric protein complex of claim 93, wherein the targeting moiety comprises the extracellular domain of PD-1, or a functional portion thereof, and the signaling agent is modified IFNα2.

106. The Fc-based chimeric protein complex of claim 93, wherein the targeting moiety comprises the NGR peptide and the signaling agent is modified IFNα2.

107. The Fc-based chimeric protein complex of claim 87, wherein the signaling agent is a wildtype IFNβ or a modified IFNβ.

108. The Fc-based chimeric protein complex of claim 107, wherein the targeting moiety binds to Clec9A and the signaling agent is modified IFNβ.

109. The Fc-based chimeric protein complex of claim 87, wherein the signaling agent is a wildtype IL-1β or a modified IL-1β.

110. The Fc-based chimeric protein complex of claim 109, wherein the targeting moiety binds to CD8 and the signaling agent is modified IL-1β.

111. The Fc-based chimeric protein complex of claim 87, wherein the signaling agent is a wildtype TNFα or a modified TNFα.

112. The Fc-based chimeric protein complex of claim 111, wherein the targeting moiety binds to CD20 and the signaling agent is modified TNFα.

113. The Fc-based chimeric protein complex of any one of claims 66-112, wherein the chimeric protein complex further comprises a second targeting moiety.

114. The Fc-based chimeric protein complex of claim 113, wherein the second targeting moiety binds to one of the following targets: CD8, CD13, CD20, Clec9A, Clec4c, PD-1, PD-L1, PD-L2, SIRP1α, FAP, XCR1, tenascin CA1, Flt3, or an ECM protein.

115. The Fc-based chimeric protein complex of any one of claims 66-114, wherein the chimeric protein complex further comprises a second signaling agent.

116. The Fc-based chimeric protein complex of claim 115, wherein the second signaling agent is a wild type or modified signaling agent.

117. The Fc-based chimeric protein complex of claim 116, wherein the second signaling agent is selected from human: IFNα2, IFNα1, IFNβ, IFNγ, consensus interferon, TNFα, TNFR, TGF-α, TGF-β, VEGF, EGF, PDGF, FGF, TRAIL, IL-13, IL-2, IL-3, IL-4, IL-6, IL-10, IL-12, IL-13, IL-15, IL-18, IL-33, IGF-1, or EPO.

118. A method for treating or preventing cancer, comprising administering to a patient in need thereof an effective amount of the Fc-based chimeric protein complex of any one of claims 66-117.

119. A use of the Fc-based chimeric protein complex of any one of claims 66-117 for treating or preventing cancer.

120. A use of the Fc-based chimeric protein complex of any one of claims 66-117 for the preparation of a medicament for the treatment of prevention of cancer.

121. The method of claim 118 or the use of claim 119 or claim 120, wherein the cancer is selected form one or more of basal cell carcinoma, biliary tract cancer; bladder cancer; bone cancer; brain and central nervous system cancer; breast cancer; cancer of the peritoneum; cervical cancer; choriocarcinoma; colon and rectum cancer; connective tissue cancer; cancer of the digestive system; endometrial cancer; esophageal cancer; eye cancer; cancer of the head and neck; gastric cancer (including gastrointestinal cancer); glioblastoma; hepatic carcinoma; hepatoma; intra-epithelial neoplasm; kidney or renal cancer; larynx cancer; leukemia; liver cancer; lung cancer (e.g., small-cell lung cancer, non-small cell lung cancer, adenocarcinoma of the lung, and squamous carcinoma of the lung); melanoma; myeloma; neuroblastoma; oral cavity cancer (lip, tongue, mouth, and pharynx); ovarian cancer; pancreatic cancer; prostate cancer; retinoblastoma; rhabdomyosarcoma; rectal cancer; cancer of the respiratory system; salivary gland carcinoma; sarcoma; skin cancer; squamous cell cancer; stomach cancer; testicular cancer; thyroid cancer; uterine or endometrial cancer; cancer of the urinary system; vulval cancer; lymphoma including Hodgkin's and non-Hodgkin's lymphoma, as well as B-cell lymphoma (including low grade/follicular non-Hodgkin's lymphoma (NHL); small lymphocytic (SL) NHL; intermediate grade/follicular NHL; intermediate grade diffuse NHL; high grade immunoblastic NHL; high grade lymphoblastic NHL; high grade small non-cleaved cell NHL; bulky disease NHL; mantle cell lymphoma; AIDS-related lymphoma; and Waldenstrom's Macroglobulinemia; chronic lymphocytic leukemia (CLL); acute lymphoblastic leukemia (ALL); Hairy cell leukemia; chronic myeloblastic leukemia; as well as other carcinomas and sarcomas; and post-transplant lymphoproliferative disorder (PTLD), as well as abnormal vascular proliferation associated with phakomatoses; edema (e.g. that associated with brain tumors); and Meigs' syndrome.

122. A method for treating or preventing an autoimmune disease, neurodegenerative disease, metabolic disease, and/or cardiovascular disease, comprising administering to a patient in need thereof an effective amount of effective amount of the Fc-based chimeric protein complex of any one of claims 66-117.

123. The use of the Fc-based chimeric protein complex of any one of claims 66-117 for treating or preventing an autoimmune disease, neurodegenerative disease, metabolic disease, and/or cardiovascular disease.

124. The use of the Fc-based chimeric protein complex of any one of claims 66-117 for the preparation of a medicament for the treatment of prevention of an autoimmune disease, neurodegenerative disease, metabolic disease, and/or cardiovascular disease.

125. The method of claim 122 or the use of claim 123 or claim 124, wherein the autoimmune disease, neurodegenerative disease, metabolic disease, and/or cardiovascular disease is selected from multiple sclerosis, diabetes mellitus, lupus, celiac disease, Crohn's disease, ulcerative colitis, Guillain-Barre syndrome, scleroderms, Goodpasture's syndrome, Wegener's granulomatosis, autoimmune epilepsy, Rasmussen's encephalitis, Primary biliary sclerosis, Sclerosing cholangitis, Autoimmune hepatitis, Addison's disease, Hashimoto's thyroiditis, Fibromyalgia, Menier's syndrome; transplantation rejection (e.g., prevention of allograft rejection) pernicious anemia, rheumatoid arthritis, systemic lupus erythematosus, dermatomyositis, Sjogren's syndrome, lupus erythematosus, myasthenia gravis, Reiter's syndrome, and Grave's disease.

126. An Fc-based chimeric protein complex, where the complex is a heterodimer comprising:
(a) a targeting moiety comprising a recognition domain that recognizes and/or binds to a target;
(b) a signaling agent, wherein the signaling agent is:
i) a wild type signaling agent; or
ii) a modified signaling agent that has one or more mutations that confer improved safety relative to the wild type signaling agent; and
(c) an Fc domain, the Fc domain comprising an Fc chain and optionally having one or more mutations promoting Fc chain pairing of the Fc domain and optionally further having one or more mutations that reduce or eliminate one or more effector functions of the Fc domain, and/or stabilizes a hinge region in the Fc domain.

127. The Fc-based chimeric protein complex of claim 126, further comprising one or more linkers.

128. The Fc-based chimeric protein complex of any one of claim 126 or 127, wherein the Fc chains of the Fc domain are selected from IgG, IgA, IgD, IgM, or IgE.

129. The Fc-based chimeric protein complex of claim 128, wherein the IgG is selected from IgG1, IgG2, IgG3, or IgG4.

130. The Fc-based chimeric protein complex of claim 128, wherein the Fc chains of the Fc domain are selected from human IgG, IgA, IgD, IgM, or IgE.

131. The Fc-based chimeric protein complex of claim 130, wherein the human IgG is selected from human IgG1, IgG2, IgG3, or IgG4.

132. The Fc-based chimeric protein complex of any one of claims 126-131, wherein the signaling agent is a modified signaling agent and the modified signaling agent has reduced affinity or activity at the signaling agent's receptor relative to a wild type signaling agent.

133. The Fc-based chimeric protein complex of claim 132, wherein the signaling agent is a modified signaling agent and the targeting moiety restores the modified signaling agent's affinity or activity at the signaling agent's receptor.

134. The Fc-based chimeric protein complex of any one of claims 126-133, wherein the Fc chain pairing is promoted by ionic pairing and/or a knob-in-hole pairing.

135. The Fc-based chimeric protein complex of any one of claims 126-134 wherein the one or more mutations to the Fc domain results in an ionic pairing between the Fc chains in the Fc domain.

136. The Fc-based chimeric protein complex of any one of claims 126-135, wherein the one or more mutations to the Fc domain results in a knob-in-hole pairing of the Fc domain.

137. The Fc-based chimeric protein complex of any one of claims 126-136, wherein the one or more mutations to the Fc domain results in the reduction or elimination of the effector function of the Fc domain.

138. The Fc-based chimeric protein complex of any one of claims 126-137, wherein the targeting moiety comprise a recognition domain that recognizes and/or binds an antigen or receptor on a tumor cell, and/or tumor stroma, and/or ECM, and/or immune cell.

139. The Fc-based chimeric protein complex of claim 138, wherein the immune cell is selected from a T cell, a B cell, a dendritic cell, a macrophage, a neutrophil, and a NK cell.

140. The Fc-based chimeric protein complex of any one of claims 126-139, wherein the targeting moiety comprises a single-domain antibody, a recombinant heavy-chain-only antibody (VHH), a single-chain antibody (scFv), a shark heavy-chain-only antibody (VNAR), a microprotein, a darpin, an anticalin, an adnectin, an aptamer, a Fv, a Fab, a Fab′, a F(ab′)₂, a peptide mimetic molecule, a natural ligand for a receptor, or a synthetic molecule.

141. The Fc-based chimeric protein complex of any one of claims 126-140, wherein the targeting moiety comprises a VHH.

142. The Fc-based chimeric protein complex of any one of claims 126-141, wherein the targeting moiety recognizes and/or binds to its target without substantially neutralizing the target's activity or wherein the targeting moiety recognizes and/or binds to its target and substantially neutralizes the target's activity.

143. The Fc-based chimeric protein complex of any one of claims 126-142, wherein the targeting moiety directly or indirectly recruits immune cells to tumor cells or to the tumor microenvironment.

144. The Fc-based chimeric protein complex of any one of claims 126-143, wherein the targeting moiety enhances antigen presentation.

145. The Fc-based chimeric protein complex of any one of claims 126-144, wherein the targeting moiety enhances tumor antigen presentation, optionally by dendritic cells.

146. The Fc-based chimeric protein complex of any one of claims 126-145, wherein the targeting moiety binds to one of the following targets: CD8, CD13, CD20, Clec9A, Clec4c, PD-1, PD-L1, PD-L2, SIRP1α, FAP, XCR1, tenascin CA1, Flt3, or an ECM protein.

147. The Fc-based chimeric protein complex of any one of claims 126-146, wherein the signaling agent is a modified signaling agent and the mutations in the modified signaling agent allows for attenuation of activity.

148. The Fc-based chimeric protein complex of claim 147, wherein agonistic or antagonistic activity is attenuated.

149. The Fc-based chimeric protein complex of any one of claims 126-148, wherein the signaling agent is a modified signaling agent and the modified signaling agent is selected from an interferon, an interleukin, and a tumor necrosis factor.

150. The Fc-based chimeric protein complex of any one of claims 126-149, wherein the modified signaling agent is selected from human: IFNα2, IFNα1, IFNβ, IFNγ, consensus interferon, TNFα, TNFR, TGF-α, TGF-β, VEGF, EGF, PDGF, FGF, TRAIL, IL-13, IL-2, IL-3, IL-4, IL-6, IL-10, IL-12, IL-13, IL-15, IL-18, IL-33, IGF-1, or EPO.

151. The Fc-based chimeric protein complex of claim 150, wherein the human IFNα2 comprises one or more mutations selected from R33A, T106X₃, R120E, R144X₁ A145X₂, M148A, R149A, and L153A and with respect to the amino acid sequence of SEQ ID NO: 1 or 2, wherein X₁ is selected from A, S, T, Y, L, and I, wherein X₂ is selected from G, H, Y, K, and D, and wherein X₃ is selected from A and E.

152. The Fc-based chimeric protein complex of claim 150, wherein the human IFNβ comprises one or more mutations selected from W22G, R27G, L32A, L32G, R35A, R35G, V148G, L151G, R152A, and R152G with respect to the amino acid sequence of SEQ ID NO: 3.

153. The Fc-based chimeric protein complex of claim 150, wherein the human IL-1β comprises one or more mutations selected from A117G/P118G, R120G, R120A, L122A, T125G/L126G, R127G, Q130A, Q130W, Q131G, K132A, S137G/Q138Y, L145G, H146A, H146G, H146E, H146N, H146R, L145A/L147A, Q148E, Q148G, Q148L, Q148G/Q150G, Q150G/D151A, M152G, F162A, F162A/Q164E, F166A, Q164E/E167K, N169G/D170G, I172A, V174A, K208E, K209A, K209D, K209A/K210A, K219S, K219Q, E221S, E221K, E221S/N224A, N224S/K225S, E244K, and N245Q with respect to the amino acid sequence of SEQ ID NO: 17.

154. The Fc-based chimeric protein complex of claim 150, wherein the human IL-2 comprises one or more mutations selected from R38A, F42A, Y45A, E62A, N88R, N88I, N88G, D20H, Q126L, Q126F, D109, and C125 with respect to the amino acid sequence of SEQ ID NO: 18.

155. The Fc-based chimeric protein complex of claim 150, wherein the human TNFα comprises one or more mutations selected from R32G, N34G, Q67G, H73G, L75G, L75A, L75S, T77A, S86G, Y870, Y87L, Y87A, Y87F, V91G, V91A, 197A, 197Q, 197S, T105G, P106G, A109Y, P113G, Y115G, Y115A, E127G, N137G, D143N, A145G, A145T, and Y87Q/197A with respect to the amino acid sequence of SEQ ID NO: 14.

156. The Fc-based chimeric protein complex of claim 150, wherein the signaling agent is a modified IFNα2, optionally with a R149A mutation with respect to the amino acid sequence of SEQ ID NO: 1 or 2.

157. The Fc-based chimeric protein complex of claim 151 or 156, wherein the targeting moiety binds to Clec9A and the signaling agent is modified IFNα2, optionally having one or more of the following mutations: R33A, R144A, R144I, R144L, R144S, R144T, R144Y, A145D, A145G, A145H, A145K, A145Y, M148A, and L153A.

158. The Fc-based chimeric protein complex of claim 156, wherein the targeting moiety binds to PD-L1 and the signaling agent is modified IFNα2.

159. The Fc-based chimeric protein complex of claim 156, wherein the targeting moiety binds to PD-1 and the signaling agent is modified IFNα2.

160. The Fc-based chimeric protein complex of claim 156, wherein:
(i) the targeting moiety binds to Clec4c and the signaling agent is modified IFNα2, or
(ii) the targeting moiety binds to XCR1 and the signaling agent is modified IFNα2.

161. The Fc-based chimeric protein complex of claim 156, wherein the targeting moiety binds to CD20 and the signaling agent is modified IFNα2.

162. The Fc-based chimeric protein complex of claim 156, wherein the targeting moiety binds to CD13 and the signaling agent is modified IFNα2.

163. The Fc-based chimeric protein complex of claim 156, wherein the targeting moiety binds to FAP and the signaling agent is modified IFNα2.

164. The Fc-based chimeric protein complex of claim 156, wherein the targeting moiety binds to CD8 and the signaling agent is modified IFNα2.

165. The Fc-based chimeric protein complex of claim 156, wherein the targeting moiety binds to Flt3 and optionally comprises the extracellular domain of Flt3L, or a functional portion thereof, and the signaling agent is modified IFNα2.

166. The Fc-based chimeric protein complex of claim 146, wherein the targeting moiety is an scFv against PD-L1 and the signaling agent is wild type IFNα2.

167. The Fc-based chimeric protein complex of claim 156, wherein the targeting moiety comprises the extracellular domain of PD-L1, or a functional portion thereof, and the signaling agent is modified IFNα2.

168. The Fc-based chimeric protein complex of claim 156, wherein the targeting moiety comprises the extracellular domain of PD-1, or a functional portion thereof, and the signaling agent is modified IFNα2.

169. The Fc-based chimeric protein complex of claim 156, wherein the targeting moiety binds comprises the NGR peptide and the signaling agent is modified IFNα2.

170. The Fc-based chimeric protein complex of claim 150, wherein the signaling agent is a wildtype IFNβ or a modified IFNβ.

171. The Fc-based chimeric protein complex of claim 170, wherein the targeting moiety binds to Clec9A and the signaling agent is modified IFNβ.

172. The Fc-based chimeric protein complex of claim 150, wherein the signaling agent is a wildtype IL-1β or a modified IL-1β.

173. The Fc-based chimeric protein complex of claim 172, wherein the targeting moiety binds to CD8 and the signaling agent is modified IL-1β.

174. The Fc-based chimeric protein complex of claim 150, wherein the signaling agent is a wildtype TNFα or a modified TNFα.

175. The Fc-based chimeric protein complex of claim 174, wherein the targeting moiety binds to CD20 and the signaling agent is modified TNFα.

176. The Fc-based chimeric protein complex of any one of claims 126-175, wherein the chimeric protein complex further comprises a second targeting moiety.

177. The Fc-based chimeric protein complex of claim 176, wherein the second targeting moiety binds to one of the following targets: CD8, CD13, CD20, Clec9A, Clec4c, PD-1, PD-L1, PD-L2, SIRP1α, FAP, XCR1, tenascin CA1, Flt3, or an ECM protein.

178. The Fc-based chimeric protein complex of any one of claims 126-177, wherein the chimeric protein complex further comprises a second signaling agent.

179. The Fc-based chimeric protein complex of claim 178, wherein the second signaling agent is a wild type or modified signaling agent.

180. The Fc-based chimeric protein complex of claim 179, wherein the second signaling agent is selected from human: IFNα2, IFNα1, IFNβ, IFNγ, consensus interferon, TNFα, TNFR, TGF-α, TGF-β, VEGF, EGF, PDGF, FGF, TRAIL, IL-1β, IL-2, IL-3, IL-4, IL-6, IL-10, IL-12, IL-13, IL-15, IL-18, IL-33, IGF-1, or EPO.

181. A method for treating or preventing cancer, comprising administering to a patient in need thereof an effective amount of the Fc-based chimeric protein complex of any one of claims 126-180.

182. A use of the Fc-based chimeric protein complex of any one of claims 126-180 for treating or preventing cancer.

183. A use of the Fc-based chimeric protein complex of any one of claims 126-180 for the preparation of a medicament for the treatment of prevention of cancer.

184. The method of claim 181 or the use of claim 182 or claim 183, wherein the cancer is selected form one or more of basal cell carcinoma, biliary tract cancer; bladder cancer; bone cancer; brain and central nervous system cancer; breast cancer; cancer of the peritoneum; cervical cancer; choriocarcinoma; colon and rectum cancer; connective tissue cancer; cancer of the digestive system; endometrial cancer; esophageal cancer; eye cancer; cancer of the head and neck; gastric cancer (including gastrointestinal cancer); glioblastoma; hepatic carcinoma; hepatoma; intra-epithelial neoplasm; kidney or renal cancer; larynx cancer; leukemia; liver cancer; lung cancer (e.g., small-cell lung cancer, non-small cell lung cancer, adenocarcinoma of the lung, and squamous carcinoma of the lung); melanoma; myeloma; neuroblastoma; oral cavity cancer (lip, tongue, mouth, and pharynx); ovarian cancer; pancreatic cancer; prostate cancer; retinoblastoma; rhabdomyosarcoma; rectal cancer; cancer of the respiratory system; salivary gland carcinoma; sarcoma; skin cancer; squamous cell cancer; stomach cancer; testicular cancer; thyroid cancer; uterine or endometrial cancer; cancer of the urinary system; vulval cancer; lymphoma including Hodgkin's and non-Hodgkin's lymphoma, as well as B-cell lymphoma (including low grade/follicular non-Hodgkin's lymphoma (NHL); small lymphocytic (SL) NHL; intermediate grade/follicular NHL; intermediate grade diffuse NHL; high grade immunoblastic NHL; high grade lymphoblastic NHL; high grade small non-cleaved cell NHL; bulky disease NHL; mantle cell lymphoma; AIDS-related lymphoma; and Waldenstrom's Macroglobulinemia; chronic lymphocytic leukemia (CLL); acute lymphoblastic leukemia (ALL); Hairy cell leukemia; chronic myeloblastic leukemia; as well as other carcinomas and sarcomas; and post-transplant lymphoproliferative disorder (PTLD), as well as abnormal vascular proliferation associated with phakomatoses; edema (e.g. that associated with brain tumors); and Meigs' syndrome.

185. A method for treating or preventing an autoimmune disease, neurodegenerative disease, metabolic disease, and/or cardiovascular disease, comprising administering to a patient in need thereof an effective amount of effective amount of the Fc-based chimeric protein complex of any one of claims 126-180.

186. A use of the Fc-based chimeric protein complex of any one of claims 126-180 for treating or preventing an autoimmune disease, neurodegenerative disease, metabolic disease, and/or cardiovascular disease.

187. A use of the Fc-based chimeric protein complex of any one of claims 126-180 for the preparation of a medicament for the treatment of prevention of an autoimmune disease, neurodegenerative disease, metabolic disease, and/or cardiovascular disease.

188. The method of claim 185 or the use of claim 186 or claim 187, wherein the autoimmune disease, neurodegenerative disease, metabolic disease, and/or cardiovascular disease is selected from multiple sclerosis, diabetes mellitus, lupus, celiac disease, Crohn's disease, ulcerative colitis, Guillain-Barre syndrome, scleroderms, Goodpasture's syndrome, Wegener's granulomatosis, autoimmune epilepsy, Rasmussen's encephalitis, Primary biliary sclerosis, Sclerosing cholangitis, Autoimmune hepatitis, Addison's disease, Hashimoto's thyroiditis, Fibromyalgia, Menier's syndrome; transplantation rejection (e.g., prevention of allograft rejection) pernicious anemia, rheumatoid arthritis, systemic lupus erythematosus, dermatomyositis, Sjogren's syndrome, lupus erythematosus, myasthenia gravis, Reiter's syndrome, and Grave's disease.

189. A nucleic acid encoding an Fc-based chimeric protein complex of any one of claim 1-57, 66-117, or 126-180, or a constituent thereof.

190. The Fc-based chimeric protein complex of any one claim 1-57, 66-117, or 126-180, wherein the Fc-based chimeric protein complex is a complex of two proteins.

191. The Fc-based chimeric protein complex of claim 190, wherein the complex comprises one or more fusion proteins.

192. The Fc-based chimeric protein complex of any one claim 1-57, 66-117, 126-180, or 190-191, wherein Fc-based chimeric protein complex has a configuration and/or orientation as shown in any one of FIGS. 1A-F, 2A-H, 3A-H, 4A-D, 5A-F, 6A-J, 7A-D, 8A-F, 9A-J, 10A-F, 11A-L, 12A-L, 13A-F, 14A-L, 15A-L, 16A-J, 17A-J, 18A-F, 19A-F, 20A-E, 38, 46A-D, 47, and 49.

193. The Fc-based chimeric protein complex of claim 192, wherein Fc-based chimeric protein complex has a configuration and/or orientation as shown in FIG. 7B.

194. The Fc-based chimeric protein complex of any one claim 1-57 or 126-180, wherein the Fc-based chimeric protein complex has a trans orientation/configuration, as relates to any targeting moiety and signaling agent, relative to each other, and/or any targeting moieties relative to each other, and/or any signaling agents relative to each other.

195. The Fc-based chimeric protein complex of any one claim 1-57 or 126-180, wherein the Fc-based chimeric protein complex has a cis orientation/configuration, as relates to any targeting moiety and signaling agent, relative to each other, and/or any targeting moieties relative to each other, and/or any signaling agents relative to each other.

196. The Fc-based chimeric protein complex of any one claim 1-57, 66-117, 126-180, or 190-195, wherein the Fc comprises L234A, L235A, and one additional mutation selected from K322A, K322Q, D265A, P32G, and P331S substitutions in human IgG1, wherein the numbering is based on the EU convention.

197. The Fc-based chimeric protein complex of any one claim 1-57, 66-117, 126-180, or 190-195, wherein the Fc comprises a S228P substitution in human IgG4, wherein the numbering is based on the EU convention.

The application's sequence listing, which the Patent Office published only in electronic form, follows.

SEQUENCE LISTING (1570 sequences)

SEQ ID NO: 1 - protein, 165 aa, Artificial Sequence
  Synthetic Sequence (IFN-alpha2a)
CDLPQTHSLGSRRTLMLLAQMRKISLFSCLKDRHDFGFPQEEFGNQFQKAETIPVLHEMIQQIFNLFSTKDSSAAWDETLLDKFYTELYQQLNDLEACVIQGVGVTETPLMKEDSILAVRKYFQRITLYLKEKKYSPCAWEVVRAEIMRSFSLSTNLQESLRSKE

SEQ ID NO: 2 - protein, 165 aa, Artificial Sequence [sequence omitted]

SEQ ID NO: 3 - protein, 166 aa, Homo sapiens
  MISC_FEATURE: human IFN-beta
MSYNLLGFLQRSSNFQCQKLLWQLNGRLEYCLKDRMNFDIPEEIKQLQQFQKEDAALTIYEMLQNIFAIFRQDSSSTGWNETIVENLLANVYHQINHLKTVLEEKLEKEDFTRGKLMSSLHLKRYYGRILHYLKAKEYSHCAWTIVRVEILRNFYFINRLTGYLRN

SEQ ID NO: 4 - protein, 167 aa, Artificial Sequence
  Synthetic Sequence (consensus interferon)
MCDLPQTHSLGNRRALILLAQMRRISPFSCLKDRHDFGFPQEEFDGNQFQKAQAISVLHEMIQQTFNLFSTKDSSAAWDESLLEKFYTELYQQLNDLEACVIQEVGVEETPLMNVDSILAVKKYFQRITLYLTEKKYSPCAWEVVRAEIMRSFSLSTNLQERLRRKE

SEQ ID NO: 5 - protein, 166 aa, Artificial Sequence
  Synthetic Sequence (consensus interferon)
CDLPQTHSLGNRRALILLAQMRRISPFSCLKDRHDFGFPQEEFDGNQFQKAQAISVLHEMIQQTFNLFSTKDSSAAWDESLLEKFYTELYQQLNDLEACVIQEVGVEETPLMNVDSILAVKKYFQRITLYLTEKKYSPCAWEVVRAEIMRSFSLSTNLQERLRRKE

SEQ ID NO: 6 - protein, 166 aa, Artificial Sequence
  Synthetic Sequence (IFN-CON2)
CDLPQTHSLGNRRTLMLLAQMRRISPFSCLKDRHDFGFPQEEFDGNQFQKAQAISVLHEMIQQTFNLFSTKDSSAAWDESLLEKFYTELYQQLNDLEACVIQEVGVEETPLMNVDSILAVKKYFQRITLYLTEKKYSPCAWEVVRAEIMRSFSLSTNLQERLRRKE

SEQ ID NO: 7 - protein, 166 aa, Artificial Sequence
  Synthetic Sequence (IFN-CON3)
CDLPQTHSLGNRRALILLAQMRRISPFSCLKDRHDFGFPQEEFDGNQFQKAQAISVLHEMIQQTFNLFSTKDSSAAWDESLLEKFYTELYQQLNDLEACVIQEVGVEETPLMNEDSILAVRKYFQRITLYLTEKKYSPCAWEVVRAEIMRSFSLSTNLQERLRRKE

SEQ ID NO: 8 - protein, 167 aa, Artificial Sequence
  Synthetic Sequence (consensus variant)
MCDLPQTHSLGNRRALILLAQMRRISPFSCLKDRHDFGFPQEEFDGNQFQKAQAISVLHEMIQQTFNLFSTKDSSAAWDESLLEKFYTELYQQLNDLEACVIQEVGVEETPLMNEDSILAVRKYFQRITLYLTEKKYSPCAWEVVRAEIMRSFSLSTNLQERLRRKE

SEQ ID NO: 9 - protein, 167 aa, Artificial Sequence
  Synthetic Sequence (consensus interferon variant)
MCDLPQTHSLGNRRALILLAQMRRISPFSCLKDRHDFGFPQEEFDGNQFQKAQAISVLHEMIQQTFNLFSTKDSSAAWDESLLEKFYTELYQQLNDLEACVIQEVGVEETPLMNEDSILAVRKYFQRITLYLTEKKYSPCAWEVVRAEIMRSFSLCTNLQERLRRKE

SEQ ID NO: 10 - protein, 6 aa, Artificial Sequence
  Synthetic Sequence (consensus interferon variant)
EEFGNQ

SEQ ID NO: 11 - protein, 7 aa, Artificial Sequence
  Synthetic Sequence (consensus interferon variant)
EEFDGNQ

SEQ ID NO: 12 - protein, 165 aa, Artificial Sequence
  Synthetic Sequence (wild type amino acid sequence of VEGF165)
APMAEGGGQNHHEVVKFMDVYQRSYCHPIETLVDIFQEYPDEIEYIFKPSCVPLMRCGGCCNDEGLECVPTEESNITMQIMRIKPHQGQHIGEMSFLQHNKCECRPKKDRARQENPCGPCSERRKHLFVQDPQTCKCSCKNTDSRCKARQLELNERTCRCDKPRR

SEQ ID NO: 13 - protein, 165 aa, Artificial Sequence
  Synthetic Sequence (wild type amino acid sequence of VEGF165b )
APMAEGGGQNHHEVVKFMDVYQRSYCHPIETLVDIFQEYPDEIEYIFKPSCVPLMRCGGCCNDEGLECVPTEESNITMQIMRIKPHQGQHIGEMSFLQHNKCECRPKKDRARQENPCGPCSERRKHLFVQDPQTCKCSCKNTDSRCKARQLELNERTCRSLTRKD

SEQ ID NO: 14 - protein, 157 aa, Artificial Sequence [sequence omitted]

SEQ ID NO: 15 - protein, 171 aa, Artificial Sequence
  Synthetic Sequence (wild type TNF-beta)
LPGVGLTPSAAQTARQHPKMHLAHSNLKPAAHLIGDPSKQNSLLWRANTDRAFLQDGFSLSNNSLLVPTSGIYFVYSQVVFSGKAYSPKATSSPLYLAHEVQLFSSQYPFHVPLLSSQKMVYPGLQEPWLHSMYHGAAFQLTQGDQLSTHTDGIPHLVLSPSTVFFGAFAL

SEQ ID NO: 16 - protein, 281 aa, Artificial Sequence [sequence omitted]

SEQ ID NO: 17 - protein, 153 aa, Artificial Sequence
  Synthetic Sequence (wild type IL-1beta)
APVRSLNCTLRDSQQKSLVMSGPYELKALHLQGQDMEQQVVFSMSFVQGEESNDKIPVALGLKEKNLYLSCVLKDDKPTLQLESVDPKNYPKKKMEKRFVFNKIEINNKLEFESAQFPNWYISTSQAENMPVFLGGTKGGQDITDFTMQFVSS

SEQ ID NO: 18 - protein, 133 aa, Artificial Sequence [sequence omitted]

SEQ ID NO: 19 - protein, 129 aa, Artificial Sequence [sequence omitted]

SEQ ID NO: 20 - protein, 185 aa, Artificial Sequence
  Synthetic Sequence (wild type IL-6)
APVPPGEDSKDVAAPHRQPLTSSERIDKQIRYILDGISALRKETCNKSNMCESSKEALAENNLNLPKMAEKDGCFQSGFNEETCLVKIITGLLEFEVYLEYLQNRFESSEEQARAVQMSTKVLIQFLQKKAKNLDAITTPDPTTNASLTTKLQAQNQWLQDMTTHLILRSFKEFLQSSLRALRQM

SEQ ID NO: 21 - protein, 114 aa, Artificial Sequence
  Synthetic Sequence (wild type IL-13)
SPGPVPPSTALRELIEELVNITQNQKAPLCNGSMVWSINLTAGMYCAALESLINVSGCSAIEKTQRMLSGFCPHKVSAGQFSSLHVRDTKIEVAQFVKDLLLHLKKLFREGRFN

SEQ ID NO: 22 - protein, 194 aa, Artificial Sequence
  Synthetic Sequence (wild type IL-18)
MAAEPVEDNCINFVAMKFIDNTLYFIAEDDENLESDYFGKLESKLSVIRNLNDQVLFIDQGNRPLFEDMTDSDCRDNAPRTIFIISMYKDSQPRGMAVTISVKCEKISTLSCENKIISFKEMNPPDNIKDTKSDIIFFQRSVPGHDNKMQFESSSYEGYFLACEKERDLFKLILKKEDELGDRSIMFTVQNEDL

SEQ ID NO: 23 - protein, 270 aa, Artificial Sequence
  Synthetic Sequence (wild type IL-33)
MKPKMKYSTNKISTAKWKNTASKALCFKLGKSQQKAKEVCPMYFMKLRSGLMIKKEACYFRRETTKRPSLKTGRKHKRHLVLAACQQQSTVECFAFGISGVQKYTRALHDSSITGISPITEYLASLSTYNDQSITFALEDESYEIYVEDLKKDEKKDKVLLSYYESQHPSNESGDGVDGKMLMVTLSPTKDFWLHANNKEHSVELHKCEKPLPDQAFFVLHNMHSNCVSFECKTDPGVFIGVKDNHLALIKVDSSENLCTENILFKLSET

SEQ ID NO: 24 - protein, 193 aa, Homo sapiens
  MISC_FEATURE: human EPO (the first 27 amino acids are the signal peptide)
MGVHECPAWLWLLLSLLSLPLGLPVLGAPPRLICDSRVLERYLLEAKEAENITTGCAEHCSLNENITVPDTKVNFYAWKRMEVGQQAVEVWQGLALLSEAVLRGQALLVNSSQPWEPLQLHVDKAVSGLRSLTTLLRALGAQKEAISPPDAASAAPLRTITADTFRKLFRVYSNFLRGKLKLYTGEACRTGDR

SEQ ID NO: 25 - protein, 166 aa, Homo sapiens
  MISC_FEATURE: mature form of human EPO
APPRLICDSRVLERYLLEAKEAENITTGCAEHCSLNENITVPDTKVNFYAWKRMEVGQQAVEVWQGLALLSEAVLRGQALLVNSSQPWEPLQLHVDKAVSGLRSLTTLLRALGAQKEAISPPDAASAAPLRTITADTFRKLFRVYSNFLRGKLKLYTGEACRTGDR

SEQ ID NO: 26 - protein, 241 aa, Homo sapiens
  MISC_FEATURE: human Clec9A
MHEEEIYTSLQWDSPAPDTYQKCLSSNKCSGACCLVMVISCVFCMGLLTASIFLGVKLLQVSTIAMQQQEKLIQQERALLNFTEWKRSCALQMKYCQAFMQNSLSSAHNSSPCPNNWIQNRESCYYVSEIWSIWHTSQENCLKEGSTLLQIESKEEMDFITGSLRKIKGSYDYWVGLSQDGHSGRWLWQDGSSPSPGLLPAERSQSANQVCGYVKSNSLLSSNCSTWKYFICEKYALRSSV

SEQ ID NO: 27 - protein, 10 aa, Artificial Sequence
  Synthetic Sequence
GSISSINVMG

SEQ ID NO: 28 - protein, 10 aa, Artificial Sequence
  Synthetic Sequence
GSFSSINVMG

SEQ ID NO: 29 - protein, 10 aa, Artificial Sequence
  Synthetic Sequence
GSISSINIMG

SEQ ID NO: 30 - protein, 10 aa, Artificial Sequence
  Synthetic Sequence
GSISSINIMG

SEQ ID NO: 31 - protein, 10 aa, Artificial Sequence
  Synthetic Sequence
VSIFSINAMG

SEQ ID NO: 32 - protein, 10 aa, Artificial Sequence
  Synthetic Sequence
GSIFSLNAMG

SEQ ID NO: 33 - protein, 10 aa, Artificial Sequence
  Synthetic Sequence
GRTISNYDMA

SEQ ID NO: 34 - protein, 10 aa, Artificial Sequence
  Synthetic Sequence
GRTFTTSLMQ

SEQ ID NO: 35 - protein, 10 aa, Artificial Sequence
  Synthetic Sequence
ERNLRIYDMA

SEQ ID NO: 36 - protein, 10 aa, Artificial Sequence
  Synthetic Sequence
ERNLRSYDMA

SEQ ID NO: 37 - protein, 10 aa, Artificial Sequence
  Synthetic Sequence
GLTFSNYHMG

SEQ ID NO: 38 - protein, 10 aa, Artificial Sequence
  Synthetic Sequence
GLTFSSYHMG

SEQ ID NO: 39 - protein, 10 aa, Artificial Sequence
  Synthetic Sequence
GLTFSRYHMG

SEQ ID NO: 40 - protein, 10 aa, Artificial Sequence
  Synthetic Sequence
GLTLSSYYIA

SEQ ID NO: 41 - protein, 10 aa, Artificial Sequence
  Synthetic Sequence
GLTFSSYYTG

SEQ ID NO: 42 - protein, 10 aa, Artificial Sequence
  Synthetic Sequence
GLTLSSYHMG

SEQ ID NO: 43 - protein, 10 aa, Artificial Sequence
  Synthetic Sequence
GRTSSPYVTG

SEQ ID NO: 44 - protein, 10 aa, Artificial Sequence
  Synthetic Sequence
GFTFSGYVMS

SEQ ID NO: 45 - protein, 10 aa, Artificial Sequence
  Synthetic Sequence
GFTFSGYVMT

SEQ ID NO: 46 - protein, 10 aa, Artificial Sequence
  Synthetic Sequence
GFTFSGYLMS

SEQ ID NO: 47 - protein, 10 aa, Artificial Sequence
  Synthetic Sequence
GRISSINSMG

SEQ ID NO: 48 - protein, 10 aa, Artificial Sequence
  Synthetic Sequence
GSITSINAMG

SEQ ID NO: 49 - protein, 10 aa, Artificial Sequence
  Synthetic Sequence
GRFFRVNAMG

SEQ ID NO: 50 - protein, 10 aa, Artificial Sequence
  Synthetic Sequence
GSSDSINAMG

SEQ ID NO: 51 - protein, 10 aa, Artificial Sequence
  Synthetic Sequence
GSVFSINAWG

SEQ ID NO: 52 - protein, 10 aa, Artificial Sequence
  Synthetic Sequence
GSILSINSMG

SEQ ID NO: 53 - protein, 10 aa, Artificial Sequence
  Synthetic Sequence
VSISSINSMG

SEQ ID NO: 54 - protein, 10 aa, Artificial Sequence
  Synthetic Sequence
GRVFSINAMG

SEQ ID NO: 55 - protein, 10 aa, Artificial Sequence
  Synthetic Sequence
VNIDTLNSMA

SEQ ID NO: 56 - protein, 10 aa, Artificial Sequence
  Synthetic Sequence
GGISSINSMG

SEQ ID NO: 57 - protein, 10 aa, Artificial Sequence
  Synthetic Sequence
GSMHSVNSMA

SEQ ID NO: 58 - protein, 10 aa, Artificial Sequence
  Synthetic Sequence
GDISSINAMG

SEQ ID NO: 59 - protein, 10 aa, Artificial Sequence
  Synthetic Sequence
GSIFSIDAMG

SEQ ID NO: 60 - protein, 10 aa, Artificial Sequence
  Synthetic Sequence
GSIFSINAMG

SEQ ID NO: 61 - protein, 10 aa, Artificial Sequence
  Synthetic Sequence
GSIFSIAAMG

SEQ ID NO: 62 - protein, 10 aa, Artificial Sequence
  Synthetic Sequence
GNIASITAMG

SEQ ID NO: 63 - protein, 10 aa, Artificial Sequence
  Synthetic Sequence
GFTFDDYAIG

SEQ ID NO: 64 - protein, 10 aa, Artificial Sequence
  Synthetic Sequence
GSISSINAMG

SEQ ID NO: 65 - protein, 10 aa, Artificial Sequence
  Synthetic Sequence
VSIFRSYFMG

SEQ ID NO: 66 - protein, 10 aa, Artificial Sequence
  Synthetic Sequence
GSIVSINAIG

SEQ ID NO: 67 - protein, 10 aa, Artificial Sequence
  Synthetic Sequence
GSIFSINAMG

SEQ ID NO: 68 - protein, 10 aa, Artificial Sequence
  Synthetic Sequence
RSFSSFNAMG

SEQ ID NO: 69 - protein, 10 aa, Artificial Sequence
  Synthetic Sequence
GSFSSINAMG

SEQ ID NO: 70 - protein, 10 aa, Artificial Sequence
  Synthetic Sequence
GTSFSINGMA

SEQ ID NO: 71 - protein, 10 aa, Artificial Sequence
  Synthetic Sequence
GRTFSTYAMG

SEQ ID NO: 72 - protein, 10 aa, Artificial Sequence
  Synthetic Sequence
GSIFSINAMG

SEQ ID NO: 73 - protein, 10 aa, Artificial Sequence
  Synthetic Sequence
GRIFDINAMG

SEQ ID NO: 74 - protein, 10 aa, Artificial Sequence
  Synthetic Sequence
GTLFSINGMA

SEQ ID NO: 75 - protein, 10 aa, Artificial Sequence
  Synthetic Sequence
GSIDSINAMG

SEQ ID NO: 76 - protein, 10 aa, Artificial Sequence
  Synthetic Sequence
GRAFSTNSMG

SEQ ID NO: 77 - protein, 10 aa, Artificial Sequence
  Synthetic Sequence
GSIISINSMG

SEQ ID NO: 78 - protein, 10 aa, Artificial Sequence
  Synthetic Sequence
RNFFSINAMG

SEQ ID NO: 79 - protein, 10 aa, Artificial Sequence
  Synthetic Sequence
GRFFRVNAMG

SEQ ID NO: 80 - protein, 10 aa, Artificial Sequence
  Synthetic Sequence
GSIVSINSMG

SEQ ID NO: 81 - protein, 10 aa, Artificial Sequence
  Synthetic Sequence
GSIFSINAMG

SEQ ID NO: 82 - protein, 10 aa, Artificial Sequence
  Synthetic Sequence
GSIIGINSMG

SEQ ID NO: 83 - protein, 10 aa, Artificial Sequence
  Synthetic Sequence
GRTFPGYVMA

SEQ ID NO: 84 - protein, 10 aa, Artificial Sequence
  Synthetic Sequence
GSIFSINAMG

SEQ ID NO: 85 - protein, 10 aa, Artificial Sequence
  Synthetic Sequence
GRTFSINAMG

SEQ ID NO: 86 - protein, 10 aa, Artificial Sequence
  Synthetic Sequence
GRTLSSYTIG

SEQ ID NO: 87 - protein, 10 aa, Artificial Sequence
  Synthetic Sequence
GSFFSINAMG

SEQ ID NO: 88 - protein, 10 aa, Artificial Sequence
  Synthetic Sequence
GSIFSINSMG

SEQ ID NO: 89 - protein, 10 aa, Artificial Sequence
  Synthetic Sequence
GSIFSFNAMG

SEQ ID NO: 90 - protein, 10 aa, Artificial Sequence
  Synthetic Sequence
GSIFSINAMG

SEQ ID NO: 91 - protein, 10 aa, Artificial Sequence
  Synthetic Sequence
GRTFSTYAMA

SEQ ID NO: 92 - protein, 10 aa, Artificial Sequence
  Synthetic Sequence
GSFFSINAMG

SEQ ID NO: 93 - protein, 10 aa, Artificial Sequence
  Synthetic Sequence
VNIGSLNSMV

SEQ ID NO: 94 - protein, 10 aa, Artificial Sequence
  Synthetic Sequence
GRTLSNYAVG

SEQ ID NO: 95 - protein, 10 aa, Artificial Sequence
  Synthetic Sequence
GSISSINAMG

SEQ ID NO: 96 - protein, 10 aa, Artificial Sequence
  Synthetic Sequence
GRFFRVNAMG

SEQ ID NO: 97 - protein, 10 aa, Artificial Sequence
  Synthetic Sequence
GSVFSINAMG

SEQ ID NO: 98 - protein, 10 aa, Artificial Sequence
  Synthetic Sequence
GSIFEINSIG

SEQ ID NO: 99 - protein, 10 aa, Artificial Sequence
  Synthetic Sequence
GSIFNINSMG

SEQ ID NO: 100 - protein, 10 aa, Artificial Sequence
  Synthetic Sequence
VNIGTLNSMA

SEQ ID NO: 101 - protein, 10 aa, Artificial Sequence
  Synthetic Sequence
GSIFSINSMG

SEQ ID NO: 102 - protein, 10 aa, Artificial Sequence
  Synthetic Sequence
GRIGSINSMG

SEQ ID NO: 103 - protein, 10 aa, Artificial Sequence
  Synthetic Sequence
GSIFSFNAMG

SEQ ID NO: 104 - protein, 10 aa, Artificial Sequence
  Synthetic Sequence
GRISSINSMG

SEQ ID NO: 105 - protein, 10 aa, Artificial Sequence
  Synthetic Sequence
GRTLSNYAVA

SEQ ID NO: 106 - protein, 10 aa, Artificial Sequence
  Synthetic Sequence
GRIGSINSMG

SEQ ID NO: 107 - protein, 10 aa, Artificial Sequence
  Synthetic Sequence
RSFFSFNAMG

SEQ ID NO: 108 - protein, 10 aa, Artificial Sequence
  Synthetic Sequence
GRFFRVNAMG

SEQ ID NO: 109 - protein, 10 aa, Artificial Sequence
  Synthetic Sequence
GIIFSINAMG

SEQ ID NO: 110 - protein, 10 aa, Artificial Sequence
  Synthetic Sequence
GRTLSNYAVA

SEQ ID NO: 111 - protein, 10 aa, Artificial Sequence
  Synthetic Sequence
GRIFSVNAMG

SEQ ID NO: 112 - protein, 10 aa, Artificial Sequence
  Synthetic Sequence
GRTFSSYAMA

SEQ ID NO: 113 - protein, 16 aa, Artificial Sequence
  Synthetic Sequence
RITNLGLPNYADWLKD

SEQ ID NO: 114 - protein, 16 aa, Artificial Sequence
  Synthetic Sequence
RITNLGLPNYADSVTG

SEQ ID NO: 115 - protein, 16 aa, Artificial Sequence
  Synthetic Sequence
RITNIGLPNYADSVKG

SEQ ID NO: 116 - protein, 16 aa, Artificial Sequence
  Synthetic Sequence
RITNLGLPNYADSVEG

SEQ ID NO: 117 - protein, 16 aa, Artificial Sequence
  Synthetic Sequence
AITSGGRVVYSDSVKG

SEQ ID NO: 118 - protein, 16 aa, Artificial Sequence
  Synthetic Sequence
AITSGGRTAYADSVKG

SEQ ID NO: 119 - protein, 16 aa, Artificial Sequence
  Synthetic Sequence
HITSDGRIVYADPVKG

SEQ ID NO: 120 - protein, 17 aa, Artificial Sequence
  Synthetic Sequence
RISGSGDRTDYADSVKG

SEQ ID NO: 121 - protein, 17 aa, Artificial Sequence
  Synthetic Sequence
SITWSTGNTHYADSVKG

SEQ ID NO: 122 - protein, 17 aa, Artificial Sequence
  Synthetic Sequence
VISSSGDSTHYSDFVKG

SEQ ID NO: 123 - protein, 17 aa, Artificial Sequence
  Synthetic Sequence
VITSSGDSTHYSDFVKG

SEQ ID NO: 124 - protein, 17 aa, Artificial Sequence
  Synthetic Sequence
QITWSDASIYYAGSVKG

SEQ ID NO: 125 - protein, 17 aa, Artificial Sequence
  Synthetic Sequence
QITWSDTSIYYAGSVKG

SEQ ID NO: 126 - protein, 17 aa, Artificial Sequence
  Synthetic Sequence
QITWSDGTTYYPGSVKG

SEQ ID NO: 127 - protein, 17 aa, Artificial Sequence
  Synthetic Sequence
QIRWSDDSTYYPGSVKG

SEQ ID NO: 128 - protein, 17 aa, Artificial Sequence
  Synthetic Sequence
QISWSDDSTYYADSVKG

SEQ ID NO: 129 - protein, 16 aa, Artificial Sequence
  Synthetic Sequence
TVSWGGVTYYADSVKG

SEQ ID NO: 130 - protein, 17 aa, Artificial Sequence
  Synthetic Sequence
SIGSGGGYPSYTDSVEG

SEQ ID NO: 131 - protein, 17 aa, Artificial Sequence
  Synthetic Sequence
SIGSGGGYPSYTGSVEG

SEQ ID NO: 132 - protein, 17 aa, Artificial Sequence
  Synthetic Sequence
HIGSGGGYPSYTDSVQG

SEQ ID NO: 133 - protein, 17 aa, Artificial Sequence
  Synthetic Sequence
HIGSGGGHATYTDSVEG

SEQ ID NO: 134 - protein, 17 aa, Artificial Sequence
  Synthetic Sequence
TIGSGGGITSYADSVKG

SEQ ID NO: 135 - protein, 16 aa, Artificial Sequence
  Synthetic Sequence
AITNGGAKTYADSVKG

SEQ ID NO: 136 - protein, 16 aa, Artificial Sequence
  Synthetic Sequence
AITSGGRLSYADSVKG

SEQ ID NO: 137 - protein, 16 aa, Artificial Sequence
  Synthetic Sequence
AITNGGQTAYADSVKG

SEQ ID NO: 138 - protein, 16 aa, Artificial Sequence
  Synthetic Sequence
AITSGGRSTYIDSAKG

SEQ ID NO: 139 - protein, 16 aa, Artificial Sequence
  Synthetic Sequence
AITNQGRIAYAPSVNG

SEQ ID NO: 140 - protein, 16 aa, Artificial Sequence
  Synthetic Sequence
AITNDGRTTYVDSVKG

SEQ ID NO: 141 - protein, 16 aa, Artificial Sequence
  Synthetic Sequence
AVTVGGRYAYADSAKN

SEQ ID NO: 142 - protein, 16 aa, Artificial Sequence
  Synthetic Sequence
AITNQGATTYADSVKG

SEQ ID NO: 143 - protein, 16 aa, Artificial Sequence
  Synthetic Sequence
GITGSGQITYANSVRG

SEQ ID NO: 144 - protein, 16 aa, Artificial Sequence
  Synthetic Sequence
AITNGGRTVYGDSVKG

SEQ ID NO: 145 - protein, 16 aa, Artificial Sequence
  Synthetic Sequence
AITSGGRLAYAPSVNG

SEQ ID NO: 146 - protein, 16 aa, Artificial Sequence
  Synthetic Sequence
AITNGGRTTYVDSVKG

SEQ ID NO: 147 - protein, 16 aa, Artificial Sequence
  Synthetic Sequence
AITTGGRTTYVDSVKG

SEQ ID NO: 148 - protein, 16 aa, Artificial Sequence
  Synthetic Sequence
AITNQGRLTYADSVKG

SEQ ID NO: 149 - protein, 16 aa, Artificial Sequence
  Synthetic Sequence
AITSGGRRAYADSVKG

SEQ ID NO: 150 - protein, 18 aa, Artificial Sequence
  Synthetic Sequence
AITSASASRTTYADSVKG

SEQ ID NO: 151 - protein, 17 aa, Artificial Sequence
  Synthetic Sequence
CISRSDGSTYYDDSVKG

SEQ ID NO: 152 - protein, 16 aa, Artificial Sequence
  Synthetic Sequence
AITNQGRVTYADSVKG

SEQ ID NO: 153 - protein, 16 aa, Artificial Sequence
  Synthetic Sequence
AITDGGRLAYADSAKG

SEQ ID NO: 154 - protein, 16 aa, Artificial Sequence
  Synthetic Sequence
SITNQGIRNYSTSVMG

SEQ ID NO: 155 - protein, 16 aa, Artificial Sequence
  Synthetic Sequence
AITNQGRTTYADSVKG

SEQ ID NO: 156 - protein, 16 aa, Artificial Sequence
  Synthetic Sequence
AITNGGRIAYGIAVNG

SEQ ID NO: 157 - protein, 16 aa, Artificial Sequence
  Synthetic Sequence
AITNGGRIAYSDSAKG

SEQ ID NO: 158 - protein, 16 aa, Artificial Sequence
  Synthetic Sequence
GITSDGSTGYADSVKG

SEQ ID NO: 159 - protein, 17 aa, Artificial Sequence
  Synthetic Sequence
AISWSGGSTYYADSVKG

SEQ ID NO: 160 - protein, 16 aa, Artificial Sequence
  Synthetic Sequence
AITDQGRLAYADSAKG

SEQ ID NO: 161 - protein, 16 aa, Artificial Sequence
  Synthetic Sequence
AITNGGQTTYADSVKG

SEQ ID NO: 162 - protein, 16 aa, Artificial Sequence
  Synthetic Sequence
GITSDGSTGYADSVKG

SEQ ID NO: 163 - protein, 16 aa, Artificial Sequence
  Synthetic Sequence
AITTGGRTAYVDSVKG

SEQ ID NO: 164 - protein, 16 aa, Artificial Sequence
  Synthetic Sequence
AITSQGRITLADSVKG

SEQ ID NO: 165 - protein, 16 aa, Artificial Sequence
  Synthetic Sequence
AITVDGRLAYADSAKH

SEQ ID NO: 166 - protein, 16 aa, Artificial Sequence
  Synthetic Sequence
AITNGGRIAYGTSVMG

SEQ ID NO: 167 - protein, 16 aa, Artificial Sequence
  Synthetic Sequence
AITNGGQIAYADSVKG

SEQ ID NO: 168 - protein, 16 aa, Artificial Sequence
  Synthetic Sequence
AITDQGRTTYADSVKG

SEQ ID NO: 169 - protein, 16 aa, Artificial Sequence
  Synthetic Sequence
GITTQGRITYGNSVRG

SEQ ID NO: 170 - protein, 16 aa, Artificial Sequence
  Synthetic Sequence
AITSGGRTTYVDSVKG

SEQ ID NO: 171 - protein, 17 aa, Artificial Sequence
  Synthetic Sequence
AINWRGGDTYYADSVKG

SEQ ID NO: 172 - protein, 16 aa, Artificial Sequence
  Synthetic Sequence
AITDGGAKTYADSVKG

SEQ ID NO: 173 - protein, 16 aa, Artificial Sequence
  Synthetic Sequence
AITNQGRLSYVDSVKG

SEQ ID NO: 174 - protein, 16 aa, Artificial Sequence
  Synthetic Sequence
AITNQGRRTYADSVKG

SEQ ID NO: 175 - protein, 16 aa, Artificial Sequence
  Synthetic Sequence
AITNGGRIAYTDSVKG

SEQ ID NO: 176 - protein, 16 aa, Artificial Sequence
  Synthetic Sequence
AITNGGRTTYADSVKG

SEQ ID NO: 177 - protein, 16 aa, Artificial Sequence
  Synthetic Sequence
AITDGGRLTYADSAKG

SEQ ID NO: 178 - protein, 16 aa, Artificial Sequence
  Synthetic Sequence
AITTGGRTTYVDSVKG

SEQ ID NO: 179 - skipped

SEQ ID NO: 180 - protein, 16 aa, Artificial Sequence
  Synthetic Sequence
AITNQGRIAYADSVKG

SEQ ID NO: 181 - protein, 16 aa, Artificial Sequence
  Synthetic Sequence
GITGSGQITYANSVRG

SEQ ID NO: 182 - protein, 17 aa, Artificial Sequence
  Synthetic Sequence
AINWSSGGISYSNSAKG

SEQ ID NO: 183 - protein, 16 aa, Artificial Sequence
  Synthetic Sequence
AITGQGRTTYADSVKG

SEQ ID NO: 184 - protein, 16 aa, Artificial Sequence
  Synthetic Sequence
AITNGGQIVYADSVKG

SEQ ID NO: 185 - protein, 16 aa, Artificial Sequence
  Synthetic Sequence
AITTQGRTTYEDSVKG

SEQ ID NO: 186 - protein, 16 aa, Artificial Sequence
  Synthetic Sequence
AITSGGITNYANSVQG

SEQ ID NO: 187 - protein, 16 aa, Artificial Sequence
  Synthetic Sequence
AITVGGRLAYADSAKG

SEQ ID NO: 188 - protein, 16 aa, Artificial Sequence
  Synthetic Sequence
GITGGGQITYANSVRG

SEQ ID NO: 189 - protein, 16 aa, Artificial Sequence
  Synthetic Sequence
AITSQGRSTYADSAKG

SEQ ID NO: 190 - protein, 16 aa, Artificial Sequence
  Synthetic Sequence
AITNGGATVYADSVKG

SEQ ID NO: 191 - protein, 16 aa, Artificial Sequence
  Synthetic Sequence
AITDGGRLTYADSAKN

SEQ ID NO: 192 - protein, 16 aa, Artificial Sequence
  Synthetic Sequence
AITNGGAKTYADSVKG

SEQ ID NO: 193 - protein, 17 aa, Artificial Sequence
  Synthetic Sequence
AINWSSGGISYSNAAKG

SEQ ID NO: 194 - protein, 16 aa, Artificial Sequence
  Synthetic Sequence
AITNGGATVYADSVKG

SEQ ID NO: 195 - protein, 16 aa, Artificial Sequence
  Synthetic Sequence
AITNGGRIAYGTSVMG

SEQ ID NO: 196 - protein, 16 aa, Artificial Sequence
  Synthetic Sequence
AITNGGQTAYADSVKG

SEQ ID NO: 197 - protein, 16 aa, Artificial Sequence
  Synthetic Sequence
  misc_feature (5)..(5): Xaa can be any naturally occurring amino acid
AITNXGRTTYADSVKG

SEQ ID NO: 198 - protein, 17 aa, Artificial Sequence
  Synthetic Sequence
AIWWASGGISYANSAKG

SEQ ID NO: 199 - protein, 16 aa, Artificial Sequence
  Synthetic Sequence
AITNQGAPTYADSVKG

SEQ ID NO: 200 - protein, 17 aa, Artificial Sequence
  Synthetic Sequence
AISWSGGSTYYADSVKG

SEQ ID NO: 201 - protein, 7 aa, Artificial Sequence
  Synthetic Sequence
VALSAEY

SEQ ID NO: 202 - protein, 7 aa, Artificial Sequence
  Synthetic Sequence
VALKAEY

SEQ ID NO: 203 - protein, 7 aa, Artificial Sequence
  Synthetic Sequence
VGLKAEY

SEQ ID NO: 204 - protein, 13 aa, Artificial Sequence
  Synthetic Sequence
KTKSAVLFGGMDY

SEQ ID NO: 205 - protein, 7 aa, Artificial Sequence
  Synthetic Sequence
YIRGEDY

SEQ ID NO: 206 - protein, 7 aa, Artificial Sequence
  Synthetic Sequence
KHYASNY

SEQ ID NO: 207 - protein, 8 aa, Artificial Sequence
  Synthetic Sequence
QDFGSPSF

SEQ ID NO: 208 - protein, 8 aa, Artificial Sequence
  Synthetic Sequence
QDFRSPDF

SEQ ID NO: 209 - protein, 8 aa, Artificial Sequence
  Synthetic Sequence
QIFGSPNF

SEQ ID NO: 210 - protein, 7 aa, Artificial Sequence
  Synthetic Sequence
LAIHGDY

SEQ ID NO: 211 - protein, 7 aa, Artificial Sequence
  Synthetic Sequence
NQIRQWP

SEQ ID NO: 212 - protein, 7 aa, Artificial Sequence
  Synthetic Sequence
NSIRQWP

SEQ ID NO: 213 - protein, 7 aa, Artificial Sequence
  Synthetic Sequence
NAIRQWP

SEQ ID NO: 214 - protein, 8 aa, Artificial Sequence
  Synthetic Sequence
RKVGGPDY

SEQ ID NO: 215 - protein, 7 aa, Artificial Sequence
  Synthetic Sequence
NTFGNVY

SEQ ID NO: 216 - protein, 7 aa, Artificial Sequence
  Synthetic Sequence
FTRRDDY

SEQ ID NO: 217 - protein, 7 aa, Artificial Sequence
  Synthetic Sequence
FQSSGID

SEQ ID NO: 218 - protein, 8 aa, Artificial Sequence
  Synthetic Sequence
WAADYQQY

SEQ ID NO: 219 - protein, 8 aa, Artificial Sequence
  Synthetic Sequence
WNRDRQQY

SEQ ID NO: 220 - protein, 13 aa, Artificial Sequence
  Synthetic Sequence
KPTPVYGSTVGDY

SEQ ID NO: 221 - protein, 7 aa, Artificial Sequence
  Synthetic Sequence
FTRDKDY

SEQ ID NO: 222 - protein, 8 aa, Artificial Sequence
  Synthetic Sequence
WDRDRQQY

SEQ ID NO: 223 - protein, 7 aa, Artificial Sequence
  Synthetic Sequence
FTRTDDY

SEQ ID NO: 224 - protein, 8 aa, Artificial Sequence
  Synthetic Sequence
YDRSSTPY

SEQ ID NO: 225 - protein, 7 aa, Artificial Sequence
  Synthetic Sequence
FTRGDDY

SEQ ID NO: 226 - protein, 7 aa, Artificial Sequence
  Synthetic Sequence
LNSATTY

SEQ ID NO: 227 - protein, 7 aa, Artificial Sequence
  Synthetic Sequence
YTRDEDY

SEQ ID NO: 228 - protein, 7 aa, Artificial Sequence
  Synthetic Sequence
FTRDEDY

SEQ ID NO: 229 - protein, 13 aa, Artificial Sequence
  Synthetic Sequence
KWYDPLVIEYYDN

SEQ ID NO: 230 - protein, 7 aa, Artificial Sequence
  Synthetic Sequence
KADHNDY

SEQ ID NO: 231 - protein, 8 aa, Artificial Sequence
  Synthetic Sequence
FRSGADDY

SEQ ID NO: 232 - protein, 15 aa, Artificial Sequence
  Synthetic Sequence
EVPSTYSCSGFREDY

SEQ ID NO: 233 - protein, 8 aa, Artificial Sequence
  Synthetic Sequence
FAASGMEY

SEQ ID NO: 234 - protein, 8 aa, Artificial Sequence
  Synthetic Sequence
WTTDRQQY

SEQ ID NO: 235 - protein, 9 aa, Artificial Sequence
  Synthetic Sequence
FAGWGKEDY

SEQ ID NO: 236 - protein, 7 aa, Artificial Sequence
  Synthetic Sequence
FSPTGDY

SEQ ID NO: 237 - protein, 13 aa, Artificial Sequence
  Synthetic Sequence
KPTPVYGSTVGDY

SEQ ID NO: 238 - protein, 13 aa, Artificial Sequence
  Synthetic Sequence
KASPVYGSTVEDY

SEQ ID NO: 239 - protein, 8 aa, Artificial Sequence
  Synthetic Sequence
STPRGDSY

SEQ ID NO: 240 - protein, 15 aa, Artificial Sequence
  Synthetic Sequence
EAEGSGREGNFYERS

SEQ ID NO: 241 - protein, 8 aa, Artificial Sequence
  Synthetic Sequence
WDRDRQQY

SEQ ID NO: 242 - protein, 7 aa, Artificial Sequence
  Synthetic Sequence
FTRSDDY

SEQ ID NO: 243 - protein, 8 aa, Artificial Sequence
  Synthetic Sequence
STPRGDSY

SEQ ID NO: 244 - protein, 7 aa, Artificial Sequence
  Synthetic Sequence
FTRDTDY

SEQ ID NO: 245 - protein, 7 aa, Artificial Sequence
  Synthetic Sequence
WTTLGTF

SEQ ID NO: 246 - protein, 8 aa, Artificial Sequence
  Synthetic Sequence
WVRDGQQY

SEQ ID NO: 247 - protein, 13 aa, Artificial Sequence
  Synthetic Sequence
KAIPVYGSTVEDY

SEQ ID NO: 248 - protein, 13 aa, Artificial Sequence
  Synthetic Sequence
KAAATHLSTVADY

SEQ ID NO: 249 - protein, 7 aa, Artificial Sequence
  Synthetic Sequence
FGRFDDY

SEQ ID NO: 250 - protein, 14 aa, Artificial Sequence
  Synthetic Sequence
WGVKTGPESGSGTL

SEQ ID NO: 251 - protein, 7 aa, Artificial Sequence
  Synthetic Sequence
FTRDEDY

SEQ ID NO: 252 - protein, 10 aa, Artificial Sequence
  Synthetic Sequence
RLTTEYDYAY

SEQ ID NO: 253 - protein, 7 aa, Artificial Sequence
  Synthetic Sequence
FTRGNDY

SEQ ID NO: 254 - protein, 7 aa, Artificial Sequence
  Synthetic Sequence
FQSSGID

SEQ ID NO: 255 - protein, 7 aa, Artificial Sequence
  Synthetic Sequence
FSPTDDF

SEQ ID NO: 256 - protein, 13 aa, Artificial Sequence
  Synthetic Sequence
KAIPIYGSTAEDY

SEQ ID NO: 257 - protein, 7 aa, Artificial Sequence
  Synthetic Sequence
FSLTDDY

SEQ ID NO: 258 - protein, 8 aa, Artificial Sequence
  Synthetic Sequence
WTRDRQQY

SEQ ID NO: 259 - protein, 7 aa, Artificial Sequence
  Synthetic Sequence
FTRDEDF

SEQ ID NO: 260 - protein, 14 aa, Artificial Sequence
  Synthetic Sequence
EVEGSGREGNFYGA

SEQ ID NO: 261-266 - skipped (6 entries)

SEQ ID NO: 267 - protein, 5 aa, Artificial Sequence
  Synthetic Sequence
PGWDY

SEQ ID NO: 268 - protein, 8 aa, Artificial Sequence
  Synthetic Sequence
YDRSATAY

SEQ ID NO: 269 - protein, 11 aa, Artificial Sequence
  Synthetic Sequence
ASSVLSGTVDY

SEQ ID NO: 270 - protein, 8 aa, Artificial Sequence
  Synthetic Sequence
FAADGMEY

SEQ ID NO: 271 - protein, 13 aa, Artificial Sequence
  Synthetic Sequence
KAAASYVSTVADY

SEQ ID NO: 272 - protein, 6 aa, Artificial Sequence
  Synthetic Sequence
TAKDDY

SEQ ID NO: 273 - protein, 9 aa, Artificial Sequence
  Synthetic Sequence
FTGWGKEDY

SEQ ID NO: 274 - protein, 8 aa, Artificial Sequence
  Synthetic Sequence
WAADYQQY

SEQ ID NO: 275 - protein, 8 aa, Artificial Sequence
  Synthetic Sequence
YDRSATPY

SEQ ID NO: 276 - protein, 8 aa, Artificial Sequence
  Synthetic Sequence
WARDRQQY

SEQ ID NO: 277 - protein, 7 aa, Artificial Sequence
  Synthetic Sequence
FTRGDDY

SEQ ID NO: 278 - protein, 8 aa, Artificial Sequence
  Synthetic Sequence
WTKDRQQY

SEQ ID NO: 279 - protein, 7 aa, Artificial Sequence
  Synthetic Sequence
FTRTYDY

SEQ ID NO: 280 - protein, 11 aa, Artificial Sequence
  Synthetic Sequence
ASSILSGTVDY

SEQ ID NO: 281 - protein, 8 aa, Artificial Sequence
  Synthetic Sequence
WAADYQQY

SEQ ID NO: 282 - protein, 13 aa, Artificial Sequence
  Synthetic Sequence
KPAPVYGSTVGDY

SEQ ID NO: 283 - protein, 8 aa, Artificial Sequence
  Synthetic Sequence
FAADGMEY

SEQ ID NO: 284 - protein, 6 aa, Artificial Sequence
  Synthetic Sequence
FGSGGG

SEQ ID NO: 285 - protein, 11 aa, Artificial Sequence
  Synthetic Sequence
ASSVLSGTADY

SEQ ID NO: 286 - protein, 7 aa, Artificial Sequence
  Synthetic Sequence
FTRGDDY

SEQ ID NO: 287 - protein, 15 aa, Artificial Sequence
  Synthetic Sequence
EAEGSGREGNFYERS

SEQ ID NO: 288 - protein, 115 aa, Artificial Sequence
  Synthetic Sequence (R2CHCL8)
QVQLVESGGGLVHPGGSLRLSCAASGSISSINVMGWYRQAPGKERELVARITNLGLPNYADWLKDRFTISRDNAKNTVYLQMNSLKPEDTAVYYCYLVALSAEYWGQGTQVTVSS

SEQ ID NO: 289 - protein, 115 aa, Artificial Sequence
  Synthetic Sequence (R1CHCL50)
QVQLVESGGGLVHPGGSLRLSCAASGSFSSINVMGWYRQAPGKERELVARITNLGLPNYADSVTGRFTISRDNAKNTVYLQMNSLKPEDTAVYYCYLVALKAEYWGQGTQVTVSS

SEQ ID NO: 290 - protein, 115 aa, Artificial Sequence
  Synthetic Sequence (R1CHCL21)
QVQLVESGGGLVHRGGSLRLSCAASGSISSINIMGWYRQAPGKERELVARITNIGLPNYADSVKGRFTISRDNAKSTVYLQMNSLNAEDTAVYYCYLVALKAEYWGQGTQVTVSS

SEQ ID NO: 291 - protein, 115 aa, Artificial Sequence
  Synthetic Sequence (R2CHCL87)
QVQLVESGGGLVQPGGSLRLSCAASGSISSINVMGWYRQAPGKERELVARITNLGLPNYADSVEGRFTISRDKDENTVYLEMNTLKPEDTAVYYCYLVGLKAEYWGQGTQVTVSS

SEQ ID NO: 292 - protein, 121 aa, Artificial Sequence
  Synthetic Sequence (R2CHCL24)
QVQLVESGGGLVQPGGSLRLSCAASGSSDSINAMGWYRQAPGKERELVAAITSGGRVVYSDSVKGRGTISRDNAKNTVYLQIASLKPEDTAVYYCNVKTKSAVLFGGMDYWGKGTQVTVSS

SEQ ID NO: 293 - protein, 115 aa, Artificial Sequence
  Synthetic Sequence (R2CHCL38)
QVQLVESGGGLVQPGGSLRLSCAASVSIFSINAMGWYRQAPGKERELVAAITSGGRTAYADSVKGRFTISRDNSKNTVYLQMDSLKPEDTDVYYCKAYIRGEDYWGKGTQVTVSS

SEQ ID NO: 294 - protein, 115 aa, Artificial Sequence
  Synthetic Sequence (R1CHCL16)
DVQLVESGGGLVQPGGSLRLSCAASGSIFSLNAMGWYRQAPGKERELVAHITSDGRIVYADPVKGRFTISRVDGKNMVTLQMNSLKPEDTAVYYCNAKHYASNYWGQGTQVTVSS

SEQ ID NO: 295 - protein, 117 aa, Artificial Sequence
  Synthetic Sequence (R2CHCL10)
QVQLVESGGGSVQAGGSLRLSCAASGRTISNYDMAWSRQAPGKEREFVARISGSGDRTDYADSVKGRFTISRDNAKNTVYLQMNSLKPEDTAIYYCQIQDFGSPSFSGQGTQVTVSS

SEQ ID NO: 296 - protein, 117 aa, Artificial Sequence
  Synthetic Sequence (R1CHCL34)
DVQLVESGGGSVQAGGSLRLSCAASGRTISNYDMAWSRQAPGKEREFVARISGSGDRTDYADSVKGRFTISRDNAKNTVYLQMNSLKPEDTAIYYCQIQDFRSPDFWSQGTQVTVSS

SEQ ID NO: 297 - protein, 117 aa, Artificial Sequence
  Synthetic Sequence (R1CHCL82)
QVQLVESGGESVQAGGSLRLSCAASGRTISNYDMAWSRQAPGKEREFVARISGSGDRTDYADSVKGRFTISRDNAKNTVYLQMNSLKPEDTAIYNCQTQIFGSPNFSGQGTQVTVSS

SEQ ID NO: 298 - protein, 116 aa, Artificial Sequence
  Synthetic Sequence (R2CHCL3)
QVQLVESGGGLVQAGDSLRLSCAASGRTFTTSLMQWHRQAPGKEREFVASITWSTGNTHYADSVKGRFTISRDNARNTVYLQMNSLKPEDTAIYTCRVLAIHGDYWGQGTQVTVSS

SEQ ID NO: 299 - protein, 116 aa, Artificial Sequence
  Synthetic Sequence (R2CHCL69)
DVQLVESGGGLVQAGDSLRLSCAASERNLRIYDMAWYRQAPGKEREYVAVISSSGDSTHYSDFVKGRFTISRDNAKNTVSLQMDSLKPEDTAFYYCNVNQIRQWPWGQGTQVTVSS

SEQ ID NO: 300 - protein, 116 aa, Artificial Sequence
  Synthetic Sequence (R1CHCL56)
QVQLVESGGGLVQAGDSLRLSCAASERNLRIYDMAWYRQAPGKEREYVAVISSSGDSTHYSDFVKGRFTISRDNAKNTVSLQMDSLKPEDTAFYYCNVNSIRQWPWGQGTQVTVSS

SEQ ID NO: 301 - protein, 116 aa, Artificial Sequence
  Synthetic Sequence (R2CHCL32)
QVQLVESGGGLVQAGDSLRLSCTASERNLRSYDMAWWRQAPGKEREYVAVITSSGDSTHYSDFVKGRFTISRDNAKNTVSLQMDSLKPEDTASYYCNVNAIRQWPWGQGTQVTVSS

SEQ ID NO: 302 - protein, 117 aa, Artificial Sequence
  Synthetic Sequence (R2CHCL49)
DVQLVESGGGSVQAGGSLRLSCAISGLTFSNYHMGWYRQAPGREREFVAQITWSDASIYYAGSVKGRFTISRDNVKNIVYLQIDNLKPEDTAIYYCDARKVGGPDYWGQGTQVTVSS

SEQ ID NO: 303 - protein, 117 aa, Artificial Sequence
  Synthetic Sequence (R2CHCL53)
QVQLVESGGGLVQAGGSLTLSCAISGLTFSSYHMGWYRQAPGREREFVAQITWSDTSIYYAGSVKGRFTISRDNVKNIVYLQIDNLKPEDTAIYYCDARKVGGPDYWGQGTQVTVSS

SEQ ID NO: 304 - protein, 117 aa, Artificial Sequence
  Synthetic Sequence (R2CHCL22)
DVQLVESGGGLVQAGGSLRLSCAISGLTFSRYHMGWYRQAPGREREFVAQITWSDGTTYYPGSVKGRFTISRDNARNTVYLQIDNLKPEDTAIYYCDARKVGGPDYWGQGTQVTVSS

SEQ ID NO: 305 - protein, 117 aa, Artificial Sequence
  Synthetic Sequence (R2CHCL25)
QVQLVESGGGLVQAGGSLRLSCATSGLTLSSYYIAWYRQAPGREREFVAQIRWSDDSTYYPGSVKGRFTISRDNARNTVYLRMDNLKPEDTARYYCDARKVGGPDYWGQGTQVTVSS

SEQ ID NO: 306 - protein, 117 aa, Artificial Sequence
  Synthetic Sequence (R2CHCL18)
DVQLVESGGGLVQAGGSLRLSCATSGLTFSSYYTGWYRQAPGREREFVAQISWSDDSTYYADSVKGRFTISRDNARNTVYLQMNNLKPGDTAIYYCDARKVGGPDYWGQGTQVTVSS

SEQ ID NO: 307 - protein, 117 aa, Artificial Sequence
  Synthetic Sequence (R1CHCL23)
DVQLVESGGGLVQAGGSLRLSCATSGLTLSSYHMGWYRQAPGREREFVAQISWSDDSTYYADSVKGRFTISRDNARNTVYLQMNNLKPEDTAIYYCDARKVGGPDYWGQGTQVTVSS

SEQ ID NO: 308 - protein, 115 aa, Artificial Sequence
  Synthetic Sequence (R1CHCL27)
DVQLVESGGGLVQAGGSLRLSCAASGRTSSPYVTGWYRQTPGKEREPVATVSWGGVTYYADSVKGRFTISRDNAKNTVYLQMNALKPEDTAIYYCNVNTFGNVYWGQGTQVTVSS

SEQ ID NO: 309 - protein, 112 aa, Artificial Sequence
  Synthetic Sequence (R2CHCL13)
QVQLVESGGGLVQPGGSLRLSCAASGFTFSGYVMSWVRQAPGKGLEWVASIGSGGGYPSYTDSVEGRFTISRDNAKNTLYLLMDNLKPDDTAVYYCEMLGRRGQGTQVTVSS

SEQ ID NO: 310 - protein, 112 aa, Artificial Sequence
  Synthetic Sequence (R2CHCL14)
QVQLVESGGGLVQPGGSLRLSCAASGFTFSGYVMSWVRQAPGKGLEWVASIGSGGGYPSYTDSVEGRFTISRDNAKNTLYLQMNNLKPDDTAVYYCEMLGRRGQGTQVTVSS

SEQ ID NO: 311 - protein, 112 aa, Artificial Sequence
  Synthetic Sequence (R2CHCL42)
QVQLVESGGGLVQPGGSLRLSCAASGFTFSGYVMSWVRQAPGKGLEWVASIGSGGGYPSYTGSVEGRFTISRDNAKNTLYLLMNNLKPDDTAVYYCEMLGRRGQGTQVTVSS

SEQ ID NO: 312 - protein, 112 aa, Artificial Sequence
  Synthetic Sequence (R2CHCL41)
QVQLVESGGGLVQPGGSLRLSCAASGFTFSGYVMSWVRQAPGKGLEWVAHIGSGGGYPSYTDSVQGRFTISRDNAKNTLYLQMNNLKPEDTAVYYCEMLGRRGQGTQVTVSS

SEQ ID NO: 313 - protein, 112 aa, Artificial Sequence
  Synthetic Sequence (R2CHCL94)
QVQLVESGGGLVQPGGSLRLSCAASGFTFSGYVMTWVRQAPGKGLEWVAHIGSGGGHATYTDSVEGRFTISRDNAKNTLYLQMNNLKAEDTAVYYCEFLGRRGQGTQVTVSS

SEQ ID NO: 314 - protein, 112 aa, Artificial Sequence
  Synthetic Sequence (R2CHCL27)
QVQLVESGGGLVQPGGSLRLSCAASGFTFSGYLMSWVRQAPGKGLEWVATIGSGGGITSYADSVKGRFTISRDNAKNTLYLQMNNLKHEDTAVYYCETVIKRGQGTQVTVSS

SEQ ID NO: 315 - protein, 134 aa, Artificial Sequence
  Synthetic Sequence (1LEC 7)
QVQLQESGGGLVQPGGSLRLSCAASGRISSINSMGWYRQAPGNQRELVAAITNGGAKTYADSVKGRFTISTDNAGNTVYLQMDSLRPEDTAVYYCKAFTRRDDYWGQGTQITVSSAAAYPYDVPDYGSHHHHHH

SEQ ID NO: 316 - protein, 134 aa, Artificial Sequence
  Synthetic Sequence (1LEC 9)
QVQLQESGGGLVQAGGSLRLSCAASGSITSINAMGWYRQAPGKQRELVAAITSGGRLSYADSVKGRFTISRDNAESTVALQMNSLKPEDTAVYSCAAFQSSGIDWGQGTQVTVSSAAAYPYDVPDYGSHHHHHH

SEQ ID NO: 317 - protein, 135 aa, Artificial Sequence
  Synthetic Sequence (1LEC 26)
QVQLQESGGGLVQPGGSLRLSCAASGRFFRVNAMGWYRQAPGKQRELVAAITNGGQTAYADSVKGRFTISKESARNTVHLQMSSLKPEDTAVYYCTIWAADYQQYWGQGTQVTVSSAAAYPYDVPDYGSHHHHHH

SEQ ID NO: 318 - protein, 135 aa, Artificial Sequence
  Synthetic Sequence (1LEC 27)
QVQLQESGGGLVQAGESLRLSCAASGSSDSINAMGWYRQAPGKQRELVAAITSGGRSTYIDSAKGRATISRDNARNTAYLQMSSLKAEDTAVYYCTIWNRDRQQYWGQGTQVTVSSAAAYPYDVPDYGSHHHHHH

SEQ ID NO: 319 - protein, 140 aa, Artificial Sequence
  Synthetic Sequence (1LEC 28)
QVQLQESGGGLVQSGGSLRLSCAASGSVFSINAWGWYRQAPGKQRELVAAITNQGRIAYAPSVNGRFTISRDSAKNTVYLQMNSLKPEDTAVYYCNAKPTPVYGSTVGDYWGQGTQVTVSSAAAYPYDVPDYGSHHHHHH

SEQ ID NO: 320 - protein, 134 aa, Artificial Sequence
  Synthetic Sequence (1LEC 30)
QVQLQESGGGLVQAGGSLRLSCAASGSILSINSMGWYRPALGNQRELVAAITNDGRTTYVDSVKGRFTISRDNAKNTVYLQMNSLKPEDTAVYWCKAFTRDKDYWGQGTQVTVSSAAAYPYDVPDYGSHHHHHH

SEQ ID NO: 321-332 - skipped (12 entries)

SEQ ID NO: 333 - protein, 135 aa, Artificial Sequence
  Synthetic Sequence (1LEC 38)
  misc_feature (108)..(108): Xaa can be any naturally occurring amino acid
QVQLQESGGGLVQTGGSLRLSCAASVSISSINSMGWYRQAPGKERELVAAVTVGGRYAYADSAKNRFTISRDDAQNTVHLQMSSLRAEDTAVYYCTIWDRDRQQYWGXGTQVTVSSAAAYPYDVPDYGSHHHHHH

SEQ ID NO: 334 - protein, 134 aa, Artificial Sequence
  Synthetic Sequence (1LEC 42)
QVQLQESGGGLVQPGGSLRLSCAASGRVFSINAMGWYRQAPGKQRELVAAITNQGATTYADSVKGRFTISRDTAGNTVYLQMNSLRPEDTAVHYCKAFTRTDDYWGQGTQVTVSSAAAYPYDVPDYGSHHHHHH

SEQ ID NO: 335 - protein, 135 aa, Artificial Sequence
  Synthetic Sequence (1LEC 51)
QVQLQESGGGLVQAGGSLRLSCAASVNIDTLNSMAWYRQAPGKQRELVAGITGSGQITYANSVRGRFTVSRDNAKSTVYLQMNTLQPEDTAVYYCAAYDRSSTPYWGQGTQVTVSSAAAYPYDVPDYGSHHHHHH

SEQ ID NO: 336 - protein, 134 aa, Artificial Sequence
  Synthetic Sequence (1LEC 61)
QVQLQESGGGLVQPGGSLRLSCAASGGISSINSMGWYRQAPGNQRELVAAITNGGRTVYGDSVKGRFTISRDSAGNTVHLQMDSLRPEDTGVYYCKAFTRGDDYWGQGTQVTVSSAAAYPYDVPDYGSHHHHHH

SEQ ID NO: 337 - protein, 134 aa, Artificial Sequence
  Synthetic Sequence (1LEC 62)
QVQLQESGGGLVQPGGFLSLSCAASGSMHSVNSMAWYRQVPGKQRELVAAITSGGRLAYAPSVNGRFTISRDYAKNTIHLQMNSLEPEDTAVYYCAALNSATTYWGQGTQVTVSSAAAYPYDVPDYGSHHHHHH

SEQ ID NO: 338 - protein, 134 aa, Artificial Sequence
  Synthetic Sequence (1LEC 63)
QVQLQESGGGLVQAGGSLRLSCAATGDISSINAMGWHRPARGNERELVAAITNGGRTTYVDSVKGRFTISRDNAKNTVYLQMNSLKPEDTAVYFCKAYTRDEDYWGQGTQVTVSSAAAYPYDVPDYGSHHHHHH

SEQ ID NO: 339 - protein, 134 aa, Artificial Sequence
  Synthetic Sequence (1LEC 64)
QVQLQESGGGLVRAGGSLRLSCAASGSIFSIDAMGWYRPAHGEQRELVAAITTGGRTTYVDSVKGRFTISRDNAKNTVYLQMNSLKPEDTAVYFCKAFTRDEDYWGQGTQVTVSSAAAYPYDVPDYGSHHHHHH

SEQ ID NO: 340 - protein, 140 aa, Artificial Sequence
  Synthetic Sequence (1LEC 70)
QVQLQESGGGLVQPGGSLRLSCAASGSIFSINAMGWYRQAPGKQRELVAAITNQGRLTYADSVKGRFTISRDNAKNTVFLQMDSLKPEDTAVYYCNAKWYDPLVIEYYDNWGQGTQVTVSSAAAYPYDVPDYGSHHHHHH

SEQ ID NO: 341 - protein, 134 aa, Artificial Sequence
  Synthetic Sequence (1LEC 84)
QVQLQESGGGLVQPGGSLRLSCAASGSIFSIAAMGWYRQAPGKQRELVAAITSGGRRAYADSVKGRFTISRDNDENTVALQMNSLKPEDTDVYYCNAKADHNDYWGQGTQITVSSAAAYPYDVPDYGSHHHHHH

SEQ ID NO: 342 - protein, 137 aa, Artificial Sequence
  Synthetic Sequence (1LEC 88)
QVQLQESGGGLVQPGGSLRLSCAAIGNIASITAMGWYRQAPGKQRELVAAITSASASRTTYADSVKGRFTISRDNAKNTVYLQMNSLQPEDTAVYYCKGFRSGADDYWGQGTQVTVSSAAAYPYDVPDYGSHHHHHH

SEQ ID NO: 343 - protein, 143 aa, Artificial Sequence
  Synthetic Sequence (1LEC 91)
QVQLQESGGGLVQPGGSLRLSCAASGFTFDDYAIGWFRQAPGKEHEGVSCISRSDGSTYYDDSVKGRFTISSDNAKNTVYLQMNSLKPEDTAVYYCAAEVPSTYSCSGFREDYKGKGTQVTVSSAAAYPYDVPDYGSHHHHHH

SEQ ID NO: 344 - protein, 135 aa, Artificial Sequence
  Synthetic Sequence (1LEC 92)
QVQLQESGGGLVQPGGSLRLSCAASGSISSINAMGWYRQAPGNQRELVAAITNQGRVTYADSVKGRFTISRDGAKNTVYLQMNSLKPEDTAVYYCKVFAASGMEYWGKGTQVTVSSAAAYPYDVPDYGSHHHHHH

SEQ ID NO: 345 - protein, 135 aa, Artificial Sequence
  Synthetic Sequence (1LEC 94)
QVQLQESGGGLVQAGESLRLSCAASVSIFRSYFMGWYRQAPGKQRELVAAITDGGRLAYADSAKGRFTISREDTRNTVHLQMSSLKAEDTAVYYCTIWTTDRQQYWGQGTQVTVSSAAAYPYDVPDYGSHHHHHH

SEQ ID NO: 346 - protein, 136 aa, Artificial Sequence
  Synthetic Sequence (2LEC 6)
QVQLQESGGGWVQPGGSLRLSCAATGSIVSINAIGWYRQAPGKQRELVASITNQGIRNYSTSVMGRFTISRDDVKNTVSLQMNSLKPEDSAVYYCKGFAGWGKEDYWGQGTQVTVSSAAAYPYDVPDYGSHHHHHH

SEQ ID NO: 347 - protein, 134 aa, Artificial Sequence
  Synthetic Sequence (2LEC 13)
QVQLQESGGGLVQAGASLRLSCAASGSIFSINAMGWYRQAPGKQRELVAAITNQGRTTYADSVKGRFTISRDNAKNTVYLQMDSLEPEDTAIYYCKGFSPTGDYWGQGTQVTVSSAAAYPYDVPDYGSHHHHHH

SEQ ID NO: 348 - protein, 140 aa, Artificial Sequence
  Synthetic Sequence (2LEC 16)
QVQLQESGGGLVQPGGSLRLSCLASRSFSSFNAMGWYRQAPGKERELVAAITNGGRIAYGIAVNGRFTISRDNAKNTVYLQMNSLKPEDTAVYYCNAKPTPVYGSTVGDYWGQGTQVTVSSAAAYPYDVPDYGSHHHHHH

SEQ ID NO: 349 - protein, 140 aa, Artificial Sequence
  Synthetic Sequence (2LEC 20)
QVQLQESGGGLVQAGGSLTLSCAASGSFSSINAMGYYRQAPGKQRELVAAITNGGRIAYSDSAKGRFTISRDSAKNTMYLQMNSLKPEDTDVYYCNAKASPVYGSTVEDYWGQGTQVTVSSAAAYPYDVPDYGSHHHHHH

SEQ ID NO: 350 - protein, 135 aa, Artificial Sequence
  Synthetic Sequence (2LEC 23)
QVQLQESGGGLVQPGGSLRLSCAASGTSFSINGMAWYRQAPGGQRELVGGITSDGSTGYADSVKGRFTVSRDNAKNTVYLQMNRLKPEDTAVYYCGTSTPRGDSYWGQGTQVTVSSAAAYPYDVPDYGSHHHHHH

SEQ ID NO: 351 - protein, 145 aa, Artificial Sequence
  Synthetic Sequence (2LEC 24)
QVQLQESGGGLVQAGGSLRLSCAASGRTFSTYAMGWFRQAPGKERGLVAAISWSGGSTYYADSVKGRFTIFRDNAENTVYLQMNSLKPEDTAVYYCAAEAEGSGREGNFYERSWYQGQGTQVTVSSAAAYPYDVPDYGSHHHHHH

SEQ ID NO: 352 - protein, 135 aa, Artificial Sequence
  Synthetic Sequence (2LEC 26)
QVQLQESGGGLVETGGSLRLSCAASGSIFSINAMGWYRQAPGKQRELVAAITDQGRLAYADSAKGRFTISRENARNTLHLQMSSLKAEDTAVYYCTIWDRDRQQYWGQGTQVTVSSAAAYPYDVPDYGSHHHHHH

SEQ ID NO: 353 - protein, 134 aa, Artificial Sequence
  Synthetic Sequence (2LEC 38)
QVQLQESGGGLVQPGGSLRLSCAASGRIFDINAMGWYRQAPGKQRELVAAITNGGQTTYADSVKGRFTISRDNAGNTVYLQMNSLRPEDTAVYYCKAFTRSDDYWGQGTQVTVSSAAAYPYDVPDYGSHHHHHH

SEQ ID NO: 354 - protein, 135 aa, Artificial Sequence
  Synthetic Sequence (2LEC 48)
QVQLQESGGGLVQAGGSLRLSCAASGTLFSINGMAWYRQAPGKRRELVGGITSDGSTGYADSVKGRFTISRDNAKNTAYLQMNSLKPEDTAVYYCGTSTPRGDSYWGQGTQVTVSSAAAYPYDVPDYGSHHHHHH

SEQ ID NO: 355 - protein, 134 aa, Artificial Sequence
  Synthetic Sequence (2LEC 53)
QVQLQESGGGLVQAGGSLRLSCAASGSIDSINAMGWYRPALGEQRELVAAITTGGRTAYVDSVKGRFTISRDAAKNTVYLQMNSLKPEDTAVYSCKAFTRDTDYWGQGTQVTVSSAAAYPYDVPDYGSHHHHHH

SEQ ID NO: 356 - protein, 134 aa, Artificial Sequence
  Synthetic Sequence (2LEC 54)
QVQLQESGGGLAQPGGSLQLSCAASGRAFSTNSMGWYRQASGKQRELVAAITSQGRITLADSVKGRFTISSDNTKNTVFLQMNSLKPEDTAVYYCNAWTTLGTFGGQGTQVTVSSAAAYPYDVPDYGSHHHHHH

SEQ ID NO: 357 - protein, 136 aa, Artificial Sequence
  Synthetic Sequence (2LEC 55)
QVQLQESGGGLVQTGESLSLSCAVASGSIISINSMGWYRQAPEKQRELVAAITVDGRLAYADSAKHRFTISKESARNTVHLHMSSLKPEDTAVYYCTIWVRDGQQYWGQGTQVTVSSAAAYPYDVPDYGSHHHHHH

SEQ ID NO: 358 - protein, 140 aa, Artificial Sequence
  Synthetic Sequence (2LEC 59)
QVQLQESGGGLVQPGGSLRLSCAVSRNFFSINAMGWYRQAPGKQRELVAAITNGGRIAYGTSVMGRFTISRDDAKNTVDLQMNSLRPEDTAVYYCNAKAIPVYGSTVEDYWGQGTQVTVSSAAAYPYDVPDYGSHHHHHH

SEQ ID NO: 359 - protein, 140 aa, Artificial Sequence
  Synthetic Sequence (2LEC 60)
QVQLQESGGGLVQPGGSLRLSCAASGRFFRVNAMGWYRQVPGKQRELVAAITNGGQIAYADSVKGRFTISRDSAKNTVYLQMNSLKSEDTDVYYCNAKAAATHLSTVADYWGQGTQVTVSSAAAYPYDVPDYGSHHHHHH

SEQ ID NO: 360 - protein, 136 aa, Artificial Sequence
  Synthetic Sequence (2LEC 61)
QVQLQESGGGLVQPGGSLRLSCAASGSIVSINSMGWYRQAPGKQRELVAAITDQGRTTYADSVKGRFTISRDDAKNKNTVYLQMNSLKAEDTAVYACKAFGRFDDYWGQGTQVTVSSAAAYPYDVPDYGSHHHHHH

SEQ ID NO: 361 - protein, 141 aa, Artificial Sequence
  Synthetic Sequence (2LEC 62)
QVQLQESGGGLVQPGGSLRLSCAAYGSIFSINAMGWYRQAPGKERELVAGITTQGRITYGNSVRGRFTISGDNAKNTVYLQMKSLKPEDTAVYYCSAWGVKTGPESGSGTLEGQGTQVTVSSAAAYPYDVPDYGSHHHHHH

SEQ ID NO: 362 - protein, 134 aa, Artificial Sequence
  Synthetic Sequence (2LEC 63)
QVQLQESGGGLVQAGGSLRLSCAASGSIIGINSMGYYRTAPGKQRELVAAITSGGRTTYVDSVKGRFTISRDNAKNTVYLQMNSLKPEDTAVYFCKAFTRDEDYWGQGTQVTVSSAAAYPYDVPDYGSHHHHHH

SEQ ID NO: 363 - protein, 138 aa, Artificial Sequence
  Synthetic Sequence (2LEC 67)
QVQLQESGGGLVQAGGSLRLSCAASGRTFPGYVMAWFRQSPGQEREFAAAINWRGGDTYYADSVKGRFTISRDNVKNTVFLQMNSLKPEDTAVYFCAARLTTEYDYAYWGQGTQVTVSSAAAYPYDVPDYGSHHHHHH

SEQ ID NO: 364 - protein, 134 aa, Artificial Sequence
  Synthetic Sequence (2LEC 68)
QVQLQESGGGLVQPGESLRLSCAASGSIFSINAMGWYRQAPGKQRELVAAITDGGAKTYADSVKGRFTISTDNAGNTVYLQMDSLRPEDTAVYYCKAFTRGNDYWGQGTQVTVSSAAAYPYDVPDYGSHHHHHH

SEQ ID NO: 365 - protein, 134 aa, Artificial Sequence
  Synthetic Sequence (2LEC 76)
QVQLQESGGGLVQAGESLRLSCVVSGRTFSINAMGWYRQAPGKQRELVAAITNQGRLSYVDSVKGRFTISRDNAANTVYLQMNSLKPEDTAVYYCAAFQSSGIDWGQGTQVTVSSAAAYPYDVPDYGSHHHHHH

SEQ ID NO: 366 - protein, 134 aa, Artificial Sequence
  Synthetic Sequence (2LEC 83)
QVQLQESGGGLVQAGGSLRLSCAASGRTLSSYTIGWYRQAPGKQRELVAAITNQGRRTYADSVKGRFTISRDNAKNTVYLQMDSLKSEDTAVYYCKGFSPTDDFWGQGTQVTVSSAAAYPYDVPDYGSHHHHHH

SEQ ID NO: 367 - protein, 140 aa, Artificial Sequence
  Synthetic Sequence (2LEC 88)
QVQLQESGGGLVQPGGSLRLSCTASGSFFSINAMGWYRQAPGNQRELVAAITNGGRIAYTDSVKGRFTISNDNAKNTVYLQMNSLKPEDTDVYYCNAKAIPIYGSTAEDYWGQGTQVTVSSAAAYPYDVPDYGSHHHHHH

SEQ ID NO: 368 - protein, 134 aa, Artificial Sequence
  Synthetic Sequence (2LEC 89)
QVQLQESGGGLVQAGGSLRLSCAASGSIFSINSMGWYRQAPGKQRELVAAITNGGRTTYADSVKGRFTISRDNAKNTVYLQMDSLKPEDTAVYYCKGFSLTDDYWGQGTQVTVSSAAAYPYDVPDYGSHHHHHH

SEQ ID NO: 369 - protein, 135 aa, Artificial Sequence
  Synthetic Sequence (2LEC 90)
QVQLQESGGGLVQTGGSLRLSCAASGSIFSFNAMGWYRQAPGKQRELVAAITDGGRLTYADSAKGRFTISRENTRNTVHLQMSSLKAEDTADYYCTIWTRDRQQYWGQGTQVTVSSAAAYPYDVPDYGSHHHHHH

SEQ ID NO: 370 - protein, 134 aa, Artificial Sequence
  Synthetic Sequence (2LEC 93)
QVQLQESGGGLVQAGGSLRLSCAASGSIFSINAMGWYRPALGEQRELVAAITTGGRTTYVDSVKGRFSISRDNAKNTVYLQMNSLKPEDTAVYFCKAFTRDEDFWGQGTQVTVSSAAAYPYDVPDYGSHHHHHH

SEQ ID NO: 371 - protein, 145 aa, Artificial Sequence
  Synthetic Sequence (2LEC 95)
QVQLQESGGGLVQAGGSLRLSCEASGRTFSTYAMAWFRQAPGKERDLVAAISWSGGSTEYHDSVKGRFTISRDNTKNTVYLQMNSLKAEDTAVYYCAAEVEGSGREGNFYGASWYPGQGTQVTVSSAAAYPYDVPDYGSHHHHHH

SEQ ID NO: 372 - protein, 132 aa, Artificial Sequence
  Synthetic Sequence (3LEC 4)
QVQLQESGGGLVQPGGSLRLSCAASGSFFSINAMGWYRQAPGKQRELVAAITNQGRIAYADSVKGRFTISRDNAKNTVYLQMNSLKPEDTAVYYCGRPGWDYWGQGTQVTVSSAAAYPYDVPDYGSHHHHHH

SEQ ID NO: 373 - protein, 135 aa, Artificial Sequence
  Synthetic Sequence (3LEC 6)
QVQLQESGGGLVQAGGSLRLSCVASVNIGSLNSMVWYRQSPGKQRELVAGITGSGQITYANSVRGRFTVSRDIAKSTAYLQMNTLKPEDTAVYYCAAYDRSATAYWGQGTQVTVSSAAAYPYDVPDYGSHHHHHH

SEQ ID NO: 374 - protein, 139 aa, Artificial Sequence
  Synthetic Sequence (3LEC 9)
QVQLQESGGGLVQAGGSLRVSCAASGRTLSNYAVGWWRQAPGKQREFVAAINWSSGGISYSNSAKGRFALSRDNAKNTVYLQMDSLKPEDTAVYYCAAASSVLSGTVDYWGQGTQVTVSSAAAYPYDVPDYGSHHHHHH

SEQ ID NO: 375 - protein, 135 aa, Artificial Sequence
  Synthetic Sequence (3LEC 11)
QVQLQESGGGLVQPGGSLRLSCAASGSISSINAMGWYRQAPGKQRELVAAITGQGRTTYADSVKGRFTISRDGAKNTVYLQMNSLKPEDTAVYYCKVFAADGMEYWGKGTQVTVSSAAAYPYDVPDYGSHHHHHH

SEQ ID NO: 376 - protein, 140 aa, Artificial Sequence
  Synthetic Sequence (3LEC 13)
QVQLQESGGGLVQPGGSLRLSCAASGRFFRVNAMGWYRQAPGKQRELVAAITNGGQIVYADSVKGRFTISRDSAKNTVYLQMNSLKSEDTAVYYCNAKAAASYVSTVADYWGQGTQVTVSSAAAYPYDVPDYGSHHHHHH

SEQ ID NO: 377 - protein, 134 aa, Artificial Sequence
  Synthetic Sequence (3LEC 15)
QVQLQESGGGLVQAGGSLRLSCAASGSVFSINAMGWYRQAPEKQRELVAAITTQGRTTYEDSVKGRFTISRDGAQNTVYLQMDSLKPEDTAVYYCKAWTAKDDYWGKGTQVTVSSAAAYPYDVPDYGSHHHHHH

SEQ ID NO: 378 - protein, 136 aa, Artificial Sequence
  Synthetic Sequence (3LEC 22)
QVQLQESGGGRVQPGGSLRLSCAAIGSIFEINSIGWYRQAPGKQRELVAAITSGGITNYANSVQGRSTISRDNVNNTVYLQMNSLKPEDSAVYYCKGFTGWGKEDYWGQGTQVTVSSAAAYPYDVPDYGSHHHHHH

SEQ ID NO: 379 - protein, 135 aa, Artificial Sequence
  Synthetic Sequence (3LEC 23)
QVQLQESGGGLVQTGGSLRLSCAASGSIFNINSMGWYRQAPGKQRELVAAITVGGRLAYADSAKGRFTISKESARNTVHLQMSSLKPEDTAVYYCTIWAADYQQYWGQGTQVTVSSAAAYPYDVPDYGSHHHHHH

SEQ ID NO: 380 - protein, 135 aa, Artificial Sequence
  Synthetic Sequence (3LEC 27)
QVQLQESGGGLVQAGGSLRLSCAASVNIGTLNSMAWYREAPGKQRELVAGITGGGQITYANSVRGRFTVSRDIAKSTAYLQMNTLKPEDTAVYYCAAYDRSATPYWGQGTQVTVSSAAAYPYDVPDYGSHHHHHH

SEQ ID NO: 381 - protein, 135 aa, Artificial Sequence
  Synthetic Sequence (3LEC 30)
QVQLQESGGGLVQTGGSLRLSCAASGSIFSINSMGWYRQAPGKQRELVAAITSQGRSTYADSAKGRFTISLGNARNTVNLQMSSLKTEDTAVYYCTIWARDRQQYWGQGTQVTVSSAAAYPYDVPDYGSHHHHHH

SEQ ID NO: 382 - protein, 134 aa, Artificial Sequence
  Synthetic Sequence (3LEC 36)
QVQLQESGGGLVQPGGSLRLSCAASGRIGSINSMGWYRQAPGKQREMVAAITNGGATVYADSVKGRFTISRDNAGNTVDLHMNSLRPEDSAVYYCKAFTRGDDYWGQGTQVTVSSAAAYPYDVPDYGSHHHHHH

SEQ ID NO: 383 - protein, 135 aa, Artificial Sequence
  Synthetic Sequence (3LEC 55)
QVQLQESGGGLVQPGGSLKLSCAASGSIFSFNAMGWYRQAPGKQRELVAAITDGGRLTYADSAKNRFTISRENTRNTVHLQMSSLKAEDTAVYYCTIWTKDRQQYWGQGTQVTVSSAAAYPYDVPDYGSHHHHHH

SEQ ID NO: 384 - protein, 134 aa, Artificial Sequence
  Synthetic Sequence (3LEC 57)
QVQLQESGGGLVQPGGSLRLSCAASGRISSINSMGWYRQAPGKQRELVAAITNGGAKTYADSVKGRFTISRDGAGNTVYLQMDNLRPEDTAVYYCKAFTRTYDYWGQGTQVTVSSAAAYPYDVPDYGSHHHHHH

SEQ ID NO: 385 - protein, 139 aa, Artificial Sequence
  Synthetic Sequence (3LEC 61)
QVQLQESGGGLVQAGGSLRVSCAASGRTLSNYAVAWFRQAPGKQREFVAAINWSSGGISYSNAAKGRFALSRDNAKNTVYLQMDSLKPEDTAVYYCAAASSILSGTVDYWGQGTQVTVSSAAAYPYDVPDYGSHHHHHH

SEQ ID NO: 386 - protein, 135 aa, Artificial Sequence
  Synthetic Sequence (3LEC 62)
QVQLQESGGGLVQPGGSLRLSCAASGRIGSINSMGWYRQAPGKQREMVAAITNGGATVYADSVKGRFTISRDNAGNTVDLHMNSLRPEDSAVYYCTIWAADYQQYWGQGTQVTVSSAAAYPYDVPDYGSHHHHHH

SEQ ID NO: 387 - protein, 140 aa, Artificial Sequence
  Synthetic Sequence (3LEC 66)
QVQLQESGGGLVQPGGSLRLSCAASRSFFSFNAMGWYRQAPGKQRELVAAITNGGRIAYGTSVMGRFTISRDNAKNTVYLQMDSLKPEDTAVYYCNAKPAPVYGSTVGDYWGQGTQVTVSSAAAYPYDVPDYGSHHHHHH

SEQ ID NO: 388 - protein, 135 aa, Artificial Sequence
  Synthetic Sequence (3LEC 69)
QVQLQESGGGLVQPGGSPRLSCAASGRFFRVNAMGWYRQAPGKQRELVAAITNGGQTAYADSVKGRFTISRDSAKNTVYLQMNSLKSEDTAVYYCKVFAADGMEYWGKGTQVTVSSAAAYPYDVPDYGSHHHHHH

SEQ ID NO: 389 - protein, 133 aa, Artificial Sequence
  Synthetic Sequence (3LEC 76)
  misc_feature (54)..(54): Xaa can be any naturally occurring amino acid
QVQLQESGGGLVQPGESLRLSCAASGIIFSINAMGWYRQAPGKQRELVAAITNXGRTTYADSVKGRFTISRDNAKNTVTLQMNSLKPEDTAVYYCNAFGSGGGVGQGTQVTVSSAAAYPYDVPDYGSHHHHHH

SEQ ID NO: 390 - protein, 139 aa, Artificial Sequence
  Synthetic Sequence (3LEC 82)
QVQLQESGGGLVQAGGSLRLSCAASGRTLSNYAVAWFRQAPGKQRELVAAIWWASGGISYANSAKGRFVLSRDNAKNTVYLQMDSLKPEDTAVYYCAAASSVLSGTADYWGQGTQVTVSSAAAYPYDVPDYGSHHHHHH

SEQ ID NO: 391 - protein, 134 aa, Artificial Sequence
  Synthetic Sequence (3LEC 89)
QVQLQESGGGLVQPGGSLRLSCAASGRIFSVNAMGWYRQAPGKQRELVAAITNQGAPTYADSVKGRFTISRDNAGNTVYLQMNSLRPEDTAVYYCKAFTRGDDYWGQGTQVTVSSAAAYPYDVPDYGSHHHHHH

SEQ ID NO: 392 - protein, 145 aa, Artificial Sequence
  Synthetic Sequence (3LEC 94)
QVQLQESGGGSVQAGGSLRLSCAASGRTFSSYAMAWFRQAPGMERELVAAISWSGGSTYYADSVKGRFTISRDNAENTVYLQMNSLKPEDTAVYYCAAEAEGSGREGNFYERSWYQGQGTQVTVSSAAAYPYDVPDYGSHHHHHH

SEQ ID NO: 393 - protein, 6 aa, Artificial Sequence
  Synthetic Sequence
HHHHHH

SEQ ID NO: 394 - protein, 10 aa, Artificial Sequence
  Synthetic Sequence
YPYDVPDYGS

SEQ ID NO: 395 - protein, 19 aa, Artificial Sequence
  Synthetic Sequence
AAAYPYDVPDYGSHHHHHH

SEQ ID NO: 396 - protein, 235 aa, Homo sapiens
MALPVTALLLPLALLLHAARPSQFRVSPLDRTWNLGETVELKCQVLLSNPTSGCSWLFQPRGAAASPTFLLYLSQNKPKAAEGLDTQRFSGKRLGDTFVLTLSDFRRENEGYYFCSALSNSIMYFSHFVPVFLPAKPTTTPAPRPPTPAPTIASQPLSLRPEACRPAAGGAVHTRGLDFACDIYIWAPLAGTCGVLLLSLVITLYCNHRNRRRVCKCPRPVVKSGDKPSLSARYV

SEQ ID NO: 397 - protein, 198 aa, Homo sapiens
MALPVTALLLPLALLLHAARPSQFRVSPLDRTWNLGETVELKCQVLLSNPTSGCSWLFQPRGAAASPTFLLYLSQNKPKAAEGLDTQRFSGKRLGDTFVLTLSDFRRENEGYYFCSALSNSIMYFSHFVPVFLPAKPTTTPAPRPPTPAPTIASQPLSLRPEACRPAAGGAGNRRRVCKCPRPVVKSGDKPSLSARYV

SEQ ID NO: 398 - protein, 276 aa, Homo sapiens
MRNQAPGRPKGATFPPRRPTGSRAPPLAPELRAKQRPGERVMALPVTALLLPLALLLHAARPSQFRVSPLDRTWNLGETVELKCQVLLSNPTSGCSWLFQPRGAAASPTFLLYLSQNKPKAAEGLDTQRFSGKRLGDTFVLTLSDFRRENEGYYFCSALSNSIMYFSHFVPVFLPAKPTTTPAPRPPTPAPTIASQPLSLRPEACRPAAGGAVHTRGLDFACDIYIWAPLAGTCGVLLLSLVITLYCNHRNRRRVCKCPRPVVKSGDKPSLSARYV

SEQ ID NO: 399 - protein, 210 aa, Homo sapiens
MRPRLWLLLAAQLTVLHGNSVLQQTPAYIKVQTNKMVMLSCEAKISLSNMRIYWLRQRQAPSSDSHHEFLALWDSAKGTIHGEEVEQEKIAVFRDASRFILNLTSVKPEDSGIYFCMIVGSPELTFGKGTQLSVVDFLPTTAQPTKKSTLKKRVCRLPRPETQKGPLCSPITLGLLVAGVLVLLVSLGVAIHLCCRRRRARLRFMKQFYK

SEQ ID NO: 400 - protein, 221 aa, Homo sapiens
MRPRLWLLLAAQLTVLHGNSVLQQTPAYIKVQTNKMVMLSCEAKISLSNMRIYWLRQRQAPSSDSHHEFLALWDSAKGTIHGEEVEQEKIAVFRDASRFILNLTSVKPEDSGIYFCMIVGSPELTFGKGTQLSVVDFLPTTAQPTKKSTLKKRVCRLPRPETQKGPLCSPITLGLLVAGVLVLLVSLGVAIHLCCRRRRARLRFMKQLRLHPLEKCSRMDY

SEQ ID NO: 401 - protein, 213 aa, Homo sapiens
MRPRLWLLLAAQLTVLHGNSVLQQTPAYIKVQTNKMVMLSCEAKISLSNMRIYWLRQRQAPSSDSHHEFLALWDSAKGTIHGEEVEQEKIAVFRDASRFILNLTSVKPEDSGIYFCMIVGSPELTFGKGTQLSVVDFLPTTAQPTKKSTLKKRVCRLPRPETQKGRRRRARLRFMKQPQGEGISGTFVPQCLHGYYSNTTTSQKLLNPWILKT

SEQ ID NO: 402 - protein, 246 aa, Homo sapiens
MRPRLWLLLAAQLTVLHGNSVLQQTPAYIKVQTNKMVMLSCEAKISLSNMRIYWLRQRQAPSSDSHHEFLALWDSAKGTIHGEEVEQEKIAVFRDASRFILNLTSVKPEDSGIYFCMIVGSPELTFGKGTQLSVVDFLPTTAQPTKKSTLKKRVCRLPRPETQKGPLCSPITLGLLVAGVLVLLVSLGVAIHLCCRRRRARLRFMKQKFNIVCLKISGFTTCCCFQILQISREYGFGVLLQKDIGQ

SEQ ID NO: 403 - protein, 243 aa, Homo sapiens
MRPRLWLLLAAQLTVLHGNSVLQQTPAYIKVQTNKMVMLSCEAKISLSNMRIYWLRQRQAPSSDSHHEFLALWDSAKGTIHGEEVEQEKIAVFRDASRFILNLTSVKPEDSGIYFCMIVGSPELTFGKGTQLSVVDFLPTTAQPTKKSTLKKRVCRLPRPETQKGPLCSPITLGLLVAGVLVLLVSLGVAIHLCCRRRRARLRFMKQPQGEGISGTFVPQCLHGYYSNTTTSQKLLNPWILKT

SEQ ID NO: 404 - protein, 180 aa, Homo sapiens
MRPRLWLLLAAQLTVLHGNSVLQQTPAYIKVQTNKMVMLSCEAKISLSNMRIYWLRQRQAPSSDSHHEFLALWDSAKGTIHGEEVEQEKIAVFRDASRFILNLTSVKPEDSGIYFCMIVGSPELTFGKGTQLSVVDFLPTTAQPTKKSTLKKRVCRLPRPETQKGRRRRARLRFMKQFYK

SEQ ID NO: 405 - protein, 206 aa, Homo sapiens
MRPRLWLLLAAQLTVLHGNSVLQQTPAYIKVQTNKMVMLSCEAKISLSNMRIYWLRQRQAPSSDSHHEFLALWDSAKGTIHGEEVEQEKIAVFRDASRFILNLTSVKPEDSGIYFCMIVGSPELTFGKGTQLSVVDFLPTTAQPTKKSTLKKRVCRLPRPETQKDFTNKQRIGFWCPATKRHRSVMSTMWKNERRDTFNPGEFNGC

SEQ ID NO: 406 - protein, 198 aa, Homo sapiens
MRPRLWLLLAAQLTVLHGNSVLQQTPAYIKVQTNKMVMLSCEAKISLSNMRIYWLRQRQAPSSDSHHEFLALWDSAKGTIHGEEVEQEKIAVFRDASRFILNLTSVKPEDSGIYFCMIVGSPELTFGKGTQLSVVDFLPTTAQPTKKSTLKKRVCRLPRPETQKGLKGKVYQEPLSPNACMDTTAILQPHRSCLTHGS

SEQ ID NO: 407 - protein, 10 aa, Artificial Sequence
  Synthetic Sequence
GFTFDDYAMS

SEQ ID NO: 408 - protein, 10 aa, Artificial Sequence
  Synthetic Sequence
GFTFDDYAIG

SEQ ID NO: 409 - protein, 10 aa, Artificial Sequence
  Synthetic Sequence
GRSFSSYTLA

SEQ ID NO: 410 - protein, 10 aa, Artificial Sequence
  Synthetic Sequence
GRTFSSYTMG

SEQ ID NO: 411 - protein, 10 aa, Artificial Sequence
  Synthetic Sequence
GRTFSSYIMG

SEQ ID NO: 412 - protein, 10 aa, Artificial Sequence
  Synthetic Sequence
GRTFSSYTMG

SEQ ID NO: 413 - protein, 14 aa, Artificial Sequence
  Synthetic Sequence
GRTSGRTFSSYTMG

SEQ ID NO: 414 - protein, 10 aa, Artificial Sequence
  Synthetic Sequence
GRTFSSYAMG

SEQ ID NO: 415 - protein, 10 aa, Artificial Sequence
  Synthetic Sequence
GLTFSNYIMG

SEQ ID NO: 416 - protein, 10 aa, Artificial Sequence
  Synthetic Sequence
GRTFSSYTMG

SEQ ID NO: 417 - protein, 10 aa, Artificial Sequence
  Synthetic Sequence
GRTFSSDTMG

SEQ ID NO: 418 - protein, 10 aa, Artificial Sequence
  Synthetic Sequence
GLTFSNYIMG

SEQ ID NO: 419 - protein, 10 aa, Artificial Sequence
  Synthetic Sequence
GFTLDYYGIG

SEQ ID NO: 420 - protein, 10 aa, Artificial Sequence
  Synthetic Sequence
GHTFSSYTMG

SEQ ID NO: 421 - protein, 10 aa, Artificial Sequence
  Synthetic Sequence
GRTFSSYVIG

SEQ ID NO: 422 - protein, 10 aa, Artificial Sequence
  Synthetic Sequence
GFAFDGYAIG

SEQ ID NO: 423 - protein, 10 aa, Artificial Sequence
  Synthetic Sequence
GFAFGFFDMT

SEQ ID NO: 424 - protein, 10 aa, Artificial Sequence
  Synthetic Sequence
GRTFSNYVIG

SEQ ID NO: 425 - protein, 10 aa, Artificial Sequence
  Synthetic Sequence
GSIFSINVMG

SEQ ID NO: 426 - protein, 10 aa, Artificial Sequence
  Synthetic Sequence
GRTFSNYNVG

SEQ ID NO: 427 - protein, 10 aa, Artificial Sequence
  Synthetic Sequence
GHTFSSYTMG

SEQ ID NO: 428 - protein, 10 aa, Artificial Sequence
  Synthetic Sequence
GRTFSTYPVG

SEQ ID NO: 429 - protein, 10 aa, Artificial Sequence
  Synthetic Sequence
GRTFSNYAMG

SEQ ID NO: 430 - protein, 10 aa, Artificial Sequence
  Synthetic Sequence
GRTFSDYRMG

SEQ ID NO: 431 - protein, 10 aa, Artificial Sequence
  Synthetic Sequence
GLTFSNYIMA

SEQ ID NO: 432 - protein, 10 aa, Artificial Sequence
  Synthetic Sequence
GRTFSNSVMG

SEQ ID NO: 433 - protein, 10 aa, Artificial Sequence
  Synthetic Sequence
GRTFSSYIIG

SEQ ID NO: 434 - protein, 10 aa, Artificial Sequence
  Synthetic Sequence
GRTFSSYVMG

SEQ ID NO: 435 - protein, 10 aa, Artificial Sequence
  Synthetic Sequence
GGTFSNYVMG

SEQ ID NO: 436 - protein, 10 aa, Artificial Sequence
  Synthetic Sequence
GRTFSNYGIG

SEQ ID NO: 437 - protein, 10 aa, Artificial Sequence
  Synthetic Sequence
GFTFDDYAIA

SEQ ID NO: 438 - protein, 10 aa, Artificial Sequence
  Synthetic Sequence
GRTFSSYTVA

SEQ ID NO: 439 - protein, 10 aa, Artificial Sequence
  Synthetic Sequence
GFPFDDYAIA

SEQ ID NO: 440 - protein, 10 aa, Artificial Sequence
  Synthetic Sequence
GRTFSSYVMG

SEQ ID NO: 441 - protein, 10 aa, Artificial Sequence
  Synthetic Sequence
GRTLSSNPMA

SEQ ID NO: 442 - protein, 10 aa, Artificial Sequence
  Synthetic Sequence
GFTFDNYAIG

SEQ ID NO: 443 - protein, 10 aa, Artificial Sequence
  Synthetic Sequence
GRAFSSYFMG

SEQ ID NO: 444 - protein, 10 aa, Artificial Sequence
  Synthetic Sequence
TPTFSSYNMG

SEQ ID NO: 445 - protein, 10 aa, Artificial Sequence
  Synthetic Sequence
GFTFDDYAIA

SEQ ID NO: 446 - protein, 10 aa, Artificial Sequence
  Synthetic Sequence
GGTFSGYIMG

SEQ ID NO: 447 - protein, 10 aa, Artificial Sequence
  Synthetic Sequence
GRSFSSYTIA

SEQ ID NO: 448 - protein, 10 aa, Artificial Sequence
  Synthetic Sequence
GFSSDDYTIG

SEQ ID NO: 449 - protein, 10 aa, Artificial Sequence
  Synthetic Sequence
GFTFDDYTIG

SEQ ID NO: 450 - protein, 10 aa, Artificial Sequence
  Synthetic Sequence
GFSSDDYTIG

SEQ ID NO: 451 - protein, 10 aa, Artificial Sequence
  Synthetic Sequence
GFTFDQYTIA

SEQ ID NO: 452 - protein, 10 aa, Artificial Sequence
  Synthetic Sequence
GRTFSSYAMA

SEQ ID NO: 453 - protein, 10 aa, Artificial Sequence
  Synthetic Sequence
GFAFDGYAIG

SEQ ID NO: 454 - protein, 10 aa, Artificial Sequence
  Synthetic Sequence
GFSSDDYTIA

SEQ ID NO: 455 - protein, 10 aa, Artificial Sequence
  Synthetic Sequence
GFSSDDYTIG

SEQ ID NO: 456 - protein, 10 aa, Artificial Sequence
  Synthetic Sequence
GFTFDDYTIG

SEQ ID NO: 457 - protein, 10 aa, Artificial Sequence
  Synthetic Sequence
GFSSDDYTIG

SEQ ID NO: 458 - protein, 10 aa, Artificial Sequence
  Synthetic Sequence
GFSSDDYTIG

SEQ ID NO: 459 - protein, 10 aa, Artificial Sequence
  Synthetic Sequence
GFSFDDYAIA

SEQ ID NO: 460 - protein, 10 aa, Artificial Sequence
  Synthetic Sequence
GFSSDDYTIG

SEQ ID NO: 461 - protein, 10 aa, Artificial Sequence
  Synthetic Sequence
GFTGNDLAIG

SEQ ID NO: 462 - protein, 10 aa, Artificial Sequence
  Synthetic Sequence
GFSSDDYTIA

SEQ ID NO: 463 - protein, 10 aa, Artificial Sequence
  Synthetic Sequence
EGTLSSYGIG

SEQ ID NO: 464 - protein, 10 aa, Artificial Sequence
  Synthetic Sequence
GFSSDDYTIA

SEQ ID NO: 465 - protein, 10 aa, Artificial Sequence
  Synthetic Sequence
GFTFDDYAIA

SEQ ID NO: 466 - protein, 10 aa, Artificial Sequence
  Synthetic Sequence
GLSSDDYTIG

SEQ ID NO: 467 - protein, 10 aa, Artificial Sequence
  Synthetic Sequence
GLSSDDYTIG

SEQ ID NO: 468 - protein, 10 aa, Artificial Sequence
  Synthetic Sequence
GFSSDDYTIG

SEQ ID NO: 469 - protein, 10 aa, Artificial Sequence
  Synthetic Sequence
GFSFDDYTIG

SEQ ID NO: 470 - protein, 10 aa, Artificial Sequence
  Synthetic Sequence
GFTFDDYAIA

SEQ ID NO: 471 - protein, 10 aa, Artificial Sequence
  Synthetic Sequence
GFTFDDYAIG

SEQ ID NO: 472 - protein, 10 aa, Artificial Sequence
  Synthetic Sequence
GFTFGDYTIG

SEQ ID NO: 473 - protein, 10 aa, Artificial Sequence
  Synthetic Sequence
EGTFSSYGIG

SEQ ID NO: 474 - protein, 10 aa, Artificial Sequence
  Synthetic Sequence
GFSSDDYTIG

SEQ ID NO: 475 - protein, 10 aa, Artificial Sequence
  Synthetic Sequence
GVSIGDYNIG

SEQ ID NO: 476 - protein, 10 aa, Artificial Sequence
  Synthetic Sequence
GFTFDDYTIA

SEQ ID NO: 477 - protein, 10 aa, Artificial Sequence
  Synthetic Sequence
GFTFDDYTIA

SEQ ID NO: 478 - protein, 17 aa, Artificial Sequence
  Synthetic Sequence
TINWNGGSAEYAEPVKG

SEQ ID NO: 479 - protein, 17 aa, Artificial Sequence
  Synthetic Sequence
CIRVSDGSTYYADPVKG

SEQ ID NO: 480 - protein, 11 aa, Artificial Sequence
  Synthetic Sequence
ASITWGGGNTY

SEQ ID NO: 481 - protein, 11 aa, Artificial Sequence
  Synthetic Sequence
AATVWTGAGTV

SEQ ID NO: 482 - protein, 11 aa, Artificial Sequence
  Synthetic Sequence
AAIGWSADITV

SEQ ID NO: 483 - protein, 11 aa, Artificial Sequence
  Synthetic Sequence
AFIDWSGGGTY

SEQ ID NO: 484 - protein, 11 aa, Artificial Sequence
  Synthetic Sequence
ATITWGGGSTY

SEQ ID NO: 485 - protein, 11 aa, Artificial Sequence
  Synthetic Sequence
AAISWSGGPTV

SEQ ID NO: 486 - protein, 11 aa, Artificial Sequence
  Synthetic Sequence
AAITWGGGSTV

SEQ ID NO: 487 - protein, 11 aa, Artificial Sequence
  Synthetic Sequence
AAITWSGVSTV

SEQ ID NO: 488 - protein, 11 aa, Artificial Sequence
  Synthetic Sequence
GAIMWSGAFTH

SEQ ID NO: 489 - protein, 11 aa, Artificial Sequence
  Synthetic Sequence
AAITWGGGSTV

SEQ ID NO: 490 - protein, 11 aa, Artificial Sequence
  Synthetic Sequence
SCISSSDRNTY

SEQ ID NO: 491 - protein, 11 aa, Artificial Sequence
  Synthetic Sequence
AFIDWSGGGTY

SEQ ID NO: 492 - protein, 11 aa, Artificial Sequence
  Synthetic Sequence
AVITWSGDSTY

SEQ ID NO: 493 - protein, 11 aa, Artificial Sequence
  Synthetic Sequence
ACISSKDGSTY

SEQ ID NO: 494 - protein, 11 aa, Artificial Sequence
  Synthetic Sequence
SGINSIGGSTT

SEQ ID NO: 495 - protein, 11 aa, Artificial Sequence
  Synthetic Sequence
AVVTWSGDSTY

SEQ ID NO: 496 - protein, 10 aa, Artificial Sequence
  Synthetic Sequence
AKITNFGITS

SEQ ID NO: 497 - protein, 11 aa, Artificial Sequence
  Synthetic Sequence
SFISWISDITY

SEQ ID NO: 498 - protein, 11 aa, Artificial Sequence
  Synthetic Sequence
AFIDWSGGGTY

SEQ ID NO: 499 - protein, 11 aa, Artificial Sequence
  Synthetic Sequence
AVILWSGVSTY

SEQ ID NO: 500 - protein, 11 aa, Artificial Sequence
  Synthetic Sequence
AAIVWSGGSTY

SEQ ID NO: 501 - protein, 11 aa, Artificial Sequence
  Synthetic Sequence
AAISSSGYHTY

SEQ ID NO: 502 - protein, 11 aa, Artificial Sequence
  Synthetic Sequence
SCISSPDGSTY

SEQ ID NO: 503 - protein, 11 aa, Artificial Sequence
  Synthetic Sequence
AAVLWSGVSTA

SEQ ID NO: 504 - protein, 11 aa, Artificial Sequence
  Synthetic Sequence
VAITWDGSATT

SEQ ID NO: 505 - protein, 11 aa, Artificial Sequence
  Synthetic Sequence
AAIGWNGGITY

SEQ ID NO: 506 - protein, 11 aa, Artificial Sequence
  Synthetic Sequence
GFITWSGASTY

SEQ ID NO: 507 - protein, 11 aa, Artificial Sequence
  Synthetic Sequence
AGINWSGESAD

SEQ ID NO: 508 - protein, 11 aa, Artificial Sequence
  Synthetic Sequence
SCIERSDGSTY

SEQ ID NO: 509 - protein, 11 aa, Artificial Sequence
  Synthetic Sequence
SCISNTDSSTY

SEQ ID NO: 510 - protein, 11 aa, Artificial Sequence
  Synthetic Sequence
SCISNTDSSTY

SEQ ID NO: 511 - protein, 11 aa, Artificial Sequence
  Synthetic Sequence
AQISWSAGSIY

SEQ ID NO: 512 - protein, 11 aa, Artificial Sequence
  Synthetic Sequence
AGMSWNPGPAV

SEQ ID NO: 513 - protein, 11 aa, Artificial Sequence
  Synthetic Sequence
SCISRSDGSTY

SEQ ID NO: 514 - protein, 11 aa, Artificial Sequence
  Synthetic Sequence
ANIGWTGDMTY

SEQ ID NO: 515 - protein, 11 aa, Artificial Sequence
  Synthetic Sequence
AAIIWSGSMTY

SEQ ID NO: 516 - protein, 11 aa, Artificial Sequence
  Synthetic Sequence
SCISNTDSSTY

SEQ ID NO: 517 - protein, 11 aa, Artificial Sequence
  Synthetic Sequence
AANTWSGGPTY

SEQ ID NO: 518 - protein, 10 aa, Artificial Sequence
  Synthetic Sequence
SCISSDGSTG

SEQ ID NO: 519 - protein, 11 aa, Artificial Sequence
  Synthetic Sequence
SCYSSSDGSTG

SEQ ID NO: 520 - protein, 10 aa, Artificial Sequence
  Synthetic Sequence
SCISSDGSTG

SEQ ID NO: 521 - protein, 11 aa, Artificial Sequence
  Synthetic Sequence
GCIKSSDGTTG

SEQ ID NO: 522 - protein, 11 aa, Artificial Sequence
  Synthetic Sequence
SCISNTDSSTY

SEQ ID NO: 523 - protein, 11 aa, Artificial Sequence
  Synthetic Sequence
AAIAWSAGSTY

SEQ ID NO: 524 - protein, 11 aa, Artificial Sequence
  Synthetic Sequence
SCISSKEGSTY

SEQ ID NO: 525 - protein, 11 aa, Artificial Sequence
  Synthetic Sequence
SCISSSDGSTG

SEQ ID NO: 526 - protein, 11 aa, Artificial Sequence
  Synthetic Sequence
SCYSSRDGTTG

SEQ ID NO: 527 - protein, 10 aa, Artificial Sequence
  Synthetic Sequence
SCISSDGSTG

SEQ ID NO: 528 - protein, 11 aa, Artificial Sequence
  Synthetic Sequence
SCYSSSDGSTG

SEQ ID NO: 529 - protein, 11 aa, Artificial Sequence
  Synthetic Sequence
SCFSSSDGSTG

SEQ ID NO: 530 - protein, 11 aa, Artificial Sequence
  Synthetic Sequence
SCISNTDSSTF

SEQ ID NO: 531 - protein, 11 aa, Artificial Sequence
  Synthetic Sequence
SCYSSSDGSTG

SEQ ID NO: 532 - protein, 11 aa, Artificial Sequence
  Synthetic Sequence
SCISNTDSSTY

SEQ ID NO: 533 - protein, 11 aa, Artificial Sequence
  Synthetic Sequence
SCISSSDGSTG

SEQ ID NO: 534 - protein, 11 aa, Artificial Sequence
  Synthetic Sequence
GGINWSGDSTD

SEQ ID NO: 535 - protein, 11 aa, Artificial Sequence
  Synthetic Sequence
SCFSSSDGSAG

SEQ ID NO: 536 - protein, 11 aa, Artificial Sequence
  Synthetic Sequence
SCISNTDSSTY

SEQ ID NO: 537 - protein, 11 aa, Artificial Sequence
  Synthetic Sequence
SCFSTRDGNAG

SEQ ID NO: 538 - protein, 11 aa, Artificial Sequence
  Synthetic Sequence
SCFSSRDGSTG

SEQ ID NO: 539 - protein, 11 aa, Artificial Sequence
  Synthetic Sequence
SCFSSRDGSTG

SEQ ID NO: 540 - protein, 10 aa, Artificial Sequence
  Synthetic Sequence
SCISSDGSTG

SEQ ID NO: 541 - protein, 11 aa, Artificial Sequence
  Synthetic Sequence
SCISNTDSSTY

SEQ ID NO: 542 - protein, 11 aa, Artificial Sequence
  Synthetic Sequence
SCISSPDGSTY

SEQ ID NO: 543 - protein, 11 aa, Artificial Sequence
  Synthetic Sequence
SCYSSSDGNTG

SEQ ID NO: 544 - protein, 11 aa, Artificial Sequence
  Synthetic Sequence
GGINWSGDSTD

SEQ ID NO: 545 - protein, 11 aa, Artificial Sequence
  Synthetic Sequence
SCFSSSDGSTG

SEQ ID NO: 546 - protein, 11 aa, Artificial Sequence
  Synthetic Sequence
SCISSGDGTTY

SEQ ID NO: 547 - protein, 10 aa, Artificial Sequence
  Synthetic Sequence
SCISSDGSTG

SEQ ID NO: 548 - protein, 10 aa, Artificial Sequence
  Synthetic Sequence
SCISSDGSTG

SEQ ID NO: 549 - protein, 11 aa, Artificial Sequence
  Synthetic Sequence
KDADLVWYNLS

SEQ ID NO: 550 - protein, 11 aa, Artificial Sequence
  Synthetic Sequence
KDADLVWYNLR

SEQ ID NO: 551 - protein, 24 aa, Artificial Sequence
  Synthetic Sequence
AGSLYTCVQSIVVVPARPYYDMDY

SEQ ID NO: 552 - protein, 19 aa, Artificial Sequence
  Synthetic Sequence
AKGLRNSDWDLRRGYEYDY

SEQ ID NO: 553 - protein, 25 aa, Artificial Sequence
  Synthetic Sequence
ADQASVPPPYGSERYDIASPSEYDY

SEQ ID NO: 554 - protein, 21 aa, Artificial Sequence
  Synthetic Sequence
ANSRAYYSSSYDLGRLASYDY

SEQ ID NO: 555 - protein, 16 aa, Artificial Sequence
  Synthetic Sequence
AAQRLGSVTDYTKYDY

SEQ ID NO: 556 - protein, 21 aa, Artificial Sequence
  Synthetic Sequence
ASVKVVAGSGIDISGSRNYDY

SEQ ID NO: 557 - protein, 21 aa, Artificial Sequence
  Synthetic Sequence
AKRLDYSATDKGVDLSDEYDY

SEQ ID NO: 558 - protein, 19 aa, Artificial Sequence
  Synthetic Sequence
AAGGSGRLRDLKVGQNYDY

SEQ ID NO: 559 - protein, 23 aa, Artificial Sequence
  Synthetic Sequence
ADSPPRTYSSGSVNLEDGSEYDY

SEQ ID NO: 560 - protein, 21 aa, Artificial Sequence
  Synthetic Sequence
VIPGRGSALPIDVGKSDEYEY

SEQ ID NO: 561 - protein, 19 aa, Artificial Sequence
  Synthetic Sequence
AAGASGRLRDLKVGQNYDY

SEQ ID NO: 562 - protein, 23 aa, Artificial Sequence
  Synthetic Sequence
ADGNVWSPPICGSAGPPPGGMDY

SEQ ID NO: 563 - protein, 16 aa, Artificial Sequence
  Synthetic Sequence
AAQRLGSVTDYTKYDY

SEQ ID NO: 564 - protein, 22 aa, Artificial Sequence
  Synthetic Sequence
AIPPRAYSGGSYSLKDQSKYEY

SEQ ID NO: 565 - protein, 23 aa, Artificial Sequence
  Synthetic Sequence
ADGNVWSPPICSSAGPPPGGMDY

SEQ ID NO: 566 - protein, 9 aa, Artificial Sequence
  Synthetic Sequence
KSRSSYSNN

SEQ ID NO: 567 - protein, 22 aa, Artificial Sequence
  Synthetic Sequence
AMPPRAYTGRSVSLKDQSKYEY

SEQ ID NO: 568 - protein, 13 aa, Artificial Sequence
  Synthetic Sequence
LDTTGWGPPPYQY

SEQ ID NO: 569 - protein, 22 aa, Artificial Sequence
  Synthetic Sequence
AHPPDPSRGGEWRLQTPSEYDY

SEQ ID NO: 570 - protein, 16 aa, Artificial Sequence
  Synthetic Sequence
AAQRLGSVTDYTKYDY

SEQ ID NO: 571 - protein, 24 aa, Artificial Sequence
  Synthetic Sequence
VPRSHFTTAQDMGQDMGAPSWYEY

SEQ ID NO: 572 - protein, 22 aa, Artificial Sequence
  Synthetic Sequence
AVLIRYYSGGYQGLSDANEYDY

SEQ ID NO: 573 - protein, 17 aa, Artificial Sequence
  Synthetic Sequence
VVKYLSGSYSYAGQYNF

SEQ ID NO: 574 - protein, 23 aa, Artificial Sequence
  Synthetic Sequence
ADFNVWSPPICGSVGPPPGGMDY

SEQ ID NO: 575 - protein, 21 aa, Artificial Sequence
  Synthetic Sequence
AHESTYYSGTYYLTDPRRYVY

SEQ ID NO: 576 - protein, 19 aa, Artificial Sequence
  Synthetic Sequence
AVPARGLTMDLENSDIYDH

SEQ ID NO: 577 - protein, 22 aa, Artificial Sequence
  Synthetic Sequence
AATLQVTGSYYLDLSTVDIYDN

SEQ ID NO: 578 - protein, 20 aa, Artificial Sequence
  Synthetic Sequence
ATLFRSNGPKDLSSGYEYDY

SEQ ID NO: 579 - protein, 13 aa, Artificial Sequence
  Synthetic Sequence
AGESGVWVGGLDY

SEQ ID NO: 580 - protein, 22 aa, Artificial Sequence
  Synthetic Sequence
VGSANSGEFRFGWVLKPDLYNY

SEQ ID NO: 581 - protein, 23 aa, Artificial Sequence
  Synthetic Sequence
ADGNVWSPPICGSAGPPPGGMDY

SEQ ID NO: 582 - protein, 23 aa, Artificial Sequence
  Synthetic Sequence
ADGNVWSPPICGSAGPPPGGMDY

SEQ ID NO: 583 - protein, 20 aa, Artificial Sequence
  Synthetic Sequence
ERGYAYCSDDGCQRTQDYDY

SEQ ID NO: 584 - protein, 21 aa, Artificial Sequence
  Synthetic Sequence
GAARAWWSGSYDYTRMNNYDY

SEQ ID NO: 585 - protein, 23 aa, Artificial Sequence
  Synthetic Sequence
AETSADSGEFRFGWVLKPSLYDY

SEQ ID NO: 586 - protein, 21 aa, Artificial Sequence
  Synthetic Sequence
AAGSAYSGSYWNITMAANYDY

SEQ ID NO: 587 - protein, 18 aa, Artificial Sequence
  Synthetic Sequence
AQRIFGAQPMDLSGDYEY

SEQ ID NO: 588 - protein, 23 aa, Artificial Sequence
  Synthetic Sequence
ADGNVWSPPICGSAGPPPGGMDY

SEQ ID NO: 589 - protein, 18 aa, Artificial Sequence
  Synthetic Sequence
ARDYRGIKDLDLKGDYDY

SEQ ID NO: 590 - protein, 25 aa, Artificial Sequence
  Synthetic Sequence
ADFNVWSPPICGSIWYGPPPRGMDY

SEQ ID NO: 591 - protein, 25 aa, Artificial Sequence
  Synthetic Sequence
ADSNVWSPPICGSRWYGPPPGGMAY

SEQ ID NO: 592 - protein, 25 aa, Artificial Sequence
  Synthetic Sequence
ADFNVWSPPICGSNWYGPPPGGMDY

SEQ ID NO: 593 - protein, 25 aa, Artificial Sequence
  Synthetic Sequence
ADFNVWSPPICGSIWYGPPPGGMDY

SEQ ID NO: 594 - protein, 23 aa, Artificial Sequence
  Synthetic Sequence
ADGNVWSPPICGSAGPPPGGMDY

SEQ ID NO: 595 - protein, 17 aa, Artificial Sequence
  Synthetic Sequence
ARIITVATMRLDSDYDY

SEQ ID NO: 596 - protein, 23 aa, Artificial Sequence
  Synthetic Sequence
ADGNVWSPPICGSAGPPPGGMDY

SEQ ID NO: 597 - protein, 25 aa, Artificial Sequence
  Synthetic Sequence
ADSNVWSPPICGRTWYGPPPGGMDY

SEQ ID NO: 598 - protein, 25 aa, Artificial Sequence
  Synthetic Sequence
ADFNVWSPPICGSIWYGPPPGGMAY

SEQ ID NO: 599 - protein, 25 aa, Artificial Sequence
  Synthetic Sequence
ADFNVWSPPICGSNWYGPPPGGMDY

SEQ ID NO: 600 - protein, 25 aa, Artificial Sequence
  Synthetic Sequence
ADFNVWSPPICGSSWYGPPPGGMDY

SEQ ID NO: 601 - protein, 25 aa, Artificial Sequence
  Synthetic Sequence
ADFNVWSPPICGSRWYGPPPGGMEY

SEQ ID NO: 602 - protein, 23 aa, Artificial Sequence
  Synthetic Sequence
ADGNVWSPPICGSAGPPPGGMDY

SEQ ID NO: 603 - protein, 25 aa, Artificial Sequence
  Synthetic Sequence
ADFNVWSPPICGSRWYGPPPGGMAY

SEQ ID NO: 604 - protein, 23 aa, Artificial Sequence
  Synthetic Sequence
ADGNVWSPPICGSAGPPPGGMDY

SEQ ID NO: 605 - protein, 25 aa, Artificial Sequence
  Synthetic Sequence
ADSNVWSPPICGKTWYGPPPGGMDY

SEQ ID NO: 606 - protein, 13 aa, Artificial Sequence
  Synthetic Sequence
AGESGVWVGGLDY

SEQ ID NO: 607 - protein, 25 aa, Artificial Sequence
  Synthetic Sequence
ADSNVWSPPICGSTWYGPPPGGMAY

SEQ ID NO: 608 - protein, 23 aa, Artificial Sequence
  Synthetic Sequence
ADGNVWSPPICGSAGPPPGGMDY

SEQ ID NO: 609 - protein, 25 aa, Artificial Sequence
  Synthetic Sequence
ADFNVWSPPICGSRWYGPPPGGMDY

SEQ ID NO: 610 - protein, 25 aa, Artificial Sequence
  Synthetic Sequence
ADFNVWSPPICGSRWYGPPPGGMDY

SEQ ID NO: 611 - protein, 25 aa, Artificial Sequence
  Synthetic Sequence
ADFNVWSPPICGSRWYGPPPGGMDY

SEQ ID NO: 612 - protein, 25 aa, Artificial Sequence
  Synthetic Sequence
ADFNVWSPPICGSIWYGPPPGGMDY

SEQ ID NO: 613 - protein, 23 aa, Artificial Sequence
  Synthetic Sequence
ADGNVWSPPICGSAGPPPGGMDY

SEQ ID NO: 614 - protein, 23 aa, Artificial Sequence
  Synthetic Sequence
ADFNVWSPPICGSVGPPPGGMDY

SEQ ID NO: 615 - protein, 25 aa, Artificial Sequence
  Synthetic Sequence
ADFNVWSPPICGSSWYGPPPGGMAY

SEQ ID NO: 616 - protein, 13 aa, Artificial Sequence
  Synthetic Sequence
AGESGVWVGGLDY

SEQ ID NO: 617 - protein, 25 aa, Artificial Sequence
  Synthetic Sequence
ADFNVWSPPICGSSWYGPPPGGMEY

SEQ ID NO: 618 - protein, 23 aa, Artificial Sequence
  Synthetic Sequence
ADGNVWSPPICGSAGPPPGGMDY

SEQ ID NO: 619 - protein, 25 aa, Artificial Sequence
  Synthetic Sequence
ADFNVWSPPICSSNWYGPPPRGMDY

SEQ ID NO: 620 - protein, 25 aa, Artificial Sequence
  Synthetic Sequence
ADFNVWSPPICGSIWYGPPPRGMDY

SEQ ID NO: 621 - protein, 132 aa, Artificial Sequence
  Synthetic Sequence
QVQLQESGGGSVQPGGSLRLSCAASGFTFDDYAMSWVRQVPGKGLEWVSTINWNGGSAEYAEPVKGRFTISRDNAKNTVYLQMNSLKLEDTAVYYCAKDADLVWYNLSTGQGTQVTVSSAAAYPYDVPDYGS

SEQ ID NO: 622 - protein, 132 aa, Artificial Sequence
  Synthetic Sequence
QVQLQESGGGLVQPGGSLRLSCAASGFTFDDYAMSWVRQVPGKGLEWVSTINWNGGSAEYAEPVKGRFTISRDNAKNTVYLQMNSLKLEDTAVYYCAKDADLVWYNLRTGQGTQVTVSSAAAYPYDVPDYGS

SEQ ID NO: 623 - protein, 145 aa, Artificial Sequence
  Synthetic Sequence
QVQLQESGGGLVQAGGSLRLSCAASGFTFDDYAIGWFRQAPGKEREGVSCIRVSDGSTYYADPVKGRFTISSDNAKNTVYLQMNSLKPEDAAVYYCAAGSLYTCVQSIVVVPARPYYDMDYWGKGTQVTVSSAAAYPYDVPDYGS

SEQ ID NO: 624 - protein, 146 aa, Artificial Sequence
  Synthetic Sequence
QVQLQESGGGLVQAGGSLRLSCAASGRSFSSYTLAWFRQAPGKEREFVASITWGGGNTYYPDSVKGRFTISRDDAKNTVYLQMNSLKPEDTAVYYCAAKGLRNSDWDLRRGYEYDYWGQGTQVTVSSAAAYPYDVPDYGSHHHHHH

SEQ ID NO: 625 - protein, 152 aa, Artificial Sequence
  Synthetic Sequence
QVQLQESGGGLVQDGGSLRLSCAFSGRTFSSYTMGWFRQGPGKEREFVAATVWTGAGTVYADSVKGRFTISRDNAKNTVYLQMNSLRPEDTAVYYCAADQASVPPPYGSERYDIASPSEYDYWGQGTQVTVSSAAAYPYDVPDYGSHHHHHH

SEQ ID NO: 626 - protein, 148 aa, Artificial Sequence
  Synthetic Sequence
QVQLQESGGGLVQAGASLRLSCAASGRTFSSYIMGWFRQAPGKEREFVAAIGWSADITVYADSVKGRFTISRDNAENMVYLQMNSLNPEDTAVYYCAANSRAYYSSSYDLGRLASYDYWGQGTQVTVSSAAAYPYDVPDYGSHHHHHH

SEQ ID NO: 627 - protein, 143 aa, Artificial Sequence
  Synthetic Sequence
QVQLQESGGGLVQAGGSLRLSCAASGRTFSSYTMGWFRQAPGKEREFVAFIDWSGGGTYYDDSVKGRFTISRDNAENTVYLQMNNLEPEDTAVYYCAAAQRLGSVTDYTKYDYWGQGTQVTVSSAAAYPYDVPDYGSHHHHHH

SEQ ID NO: 628 - protein, 152 aa, Artificial Sequence
  Synthetic Sequence
QVQLQESGGGLVQAGGSLRLSCAASGRTSGRTFSSYTMGWFRQAPGKEREFVATITWGGGSTYYADSVKGRFTISRDNANNTVYLQMNSLKPEDTAVYYCAASVKVVAGSGIDISGSRNYDYWGQGTQVTVSSAAAYPYDVPDYGSHHHHHH

SEQ ID NO: 629 - protein, 148 aa, Artificial Sequence
  Synthetic Sequence
QVQLQESGGGLVQPGGSLRLSCLASGRTFSSYAMGWFRQAPGKEREFVAAISWSGGPTVYADHVKGRFTISRDNAKNTVYLQVNSLKPEDTADYYCAAKRLDYSATDKGVDLSDEYDYWGQGTQVTVSSAAAYPYDVPDYGSHHHHHH

SEQ ID NO: 630 - protein, 146 aa, Artificial Sequence
  Synthetic Sequence
QVQLQESGGGLVQAGDSLRLSCAASGLTFSNYIMGWFRQAPGKEREFVAAITWGGGSTVYADSVEGRFTISRDGTKNTVSLQMNSLLPEDTAVYYCAAAGGSGRLRDLKVGQNYDYWGQGTQVTVSSAAAYPYDVPDYGSHHHHHH

SEQ ID NO: 631 - protein, 150 aa, Artificial Sequence
  Synthetic Sequence
QVQLQESGGGLVQAGGSLRLSCAASGRTFSSYTMGWFRQAPGREREFVAAITWSGVSTVYTDSVKGRFTVSRDNAKNTVYLQMNSLKPEDTAVYYCAADSPPRTYSSGSVNLEDGSEYDYWGQGTQVTVSSAAAYPYDVPDYGSHHHHHH

SEQ ID NO: 632 - protein, 148 aa, Artificial Sequence
  Synthetic Sequence
QVQLQESGGGLVQAGGSLRLSCAASGRTFSSDTMGWFRQAPGKEREFVGAIMWSGAFTHYADSVKGRFTISRDNAKNTVYLQMNALKPEDTAVYYCAVIPGRGSALPIDVGKSDEYEYWGQGTQVTVSSAAAYPYDVPDYGSHHHHHH

SEQ ID NO: 633 - protein, 146 aa, Artificial Sequence
  Synthetic Sequence
QVQLQESGGGLVQAGDSLRLSCAASGLTFSNYIMGWFRQAPGKEREFVAAITWGGGSTVYADSVEGRFTISRDGTKNTVSLQMNSLQPEDTAVYYCAAAGASGRLRDLKVGQNYDYWGQGTQVTVSSAAAYPYDVPDYGSHHHHHH

SEQ ID NO: 634 - protein, 150 aa, Artificial Sequence
  Synthetic Sequence
QVQLQESGGGLVQAGGSLRLSCAGSGFTLDYYGIGWFRQAPGKEREGVSCISSSDRNTYYADSVKGRFTISGDNAKNTVYLQMNNLKPEDTAVYYCAADGNVWSPPICGSAGPPPGGMDYWGKGTQVTVSSAAAYPYDVPDYGSHHHHHH

SEQ ID NO: 635 - protein, 143 aa, Artificial Sequence
  Synthetic Sequence
QVQLQESGGGLVQAGGSLRLSCVASGHTFSSYTMGWFRQAPGKEREFVAFIDWSGGGTYYANSVKGRFTISRDNAENTVYLQMNNLKPEDTAVYYCAAAQRLGSVTDYTKYDYWGQGTQVTVSSAAAYPYDVPDYGSHHHHHH

SEQ ID NO: 636 - protein, 149 aa, Artificial Sequence
  Synthetic Sequence
QVQLQESGGGLVQAGGSLRLSCAASGRTFSSYVIGWFRQAPGKEREFVAVITWSGDSTYSSDSLKGRFTISRDNAKNTVYLQMNALNPEDTAVYYCAAIPPRAYSGGSYSLKDQSKYEYWGQGTQVTVSSAAAYPYDVPDYGSHHHHHH

SEQ ID NO: 637 - protein, 149 aa, Artificial Sequence
  Synthetic Sequence
QVQLQESGGGLVQAEGSLKLSCISGFAFDGYAIGWFRQAPGKEREGVACISSKDGSTYYADSVKGRFTMSVDKTKNTVYLQMSSLKPEDTAVYYCAADGNVWSPPICSSAGPPPGGMDYWGKGTQVTVSSAAAYPYDVPDYGSHHHHHH

SEQ ID NO: 638 - protein, 139 aa, Artificial Sequence
  Synthetic Sequence
QVQLQESGGGLVQPGGSLTLSCAASGFAFGFFDMTWVRQAPGKGLEWVSGINSIGGSTTYADSVKGRFTISRDNAKNELYLQMNSLKPDDTAVYYCAKSRSSYSNNWRPPGQGTQVTVSSAAAYPYDVPDYGSHHHHHH

SEQ ID NO: 639 - protein, 149 aa, Artificial Sequence
  Synthetic Sequence
QVQLQESGGGLVQARGSLTLSCAASGRTFSNYVIGWFRQAPGEEREFVAVVTWSGDSTYSSDSLKGRFTISRDNAKNTVYLQMNNLNPEDTAVYYCAAMPPRAYTGRSVSLKDQSKYEYWGQGTQVTVSSAAAYPYDVPDYGSHHHHHH

SEQ ID NO: 640 - protein, 139 aa, Artificial Sequence
  Synthetic Sequence
QVQLQESGGGLVQPGGSLRLSCAASGSIFSINVMGWYRQTPGKERELVAKITNFGITSYADSAQGRFTISRGNAKNTVYLQMNSLKPEDTAVYYCNLDTTGWGPPPYQYWGQGTQVTVSSAAAYPYDVPDYGSHHHHHH

SEQ ID NO: 641 - protein, 149 aa, Artificial Sequence
  Synthetic Sequence
QVQLQESGGGLVQAGASLRLSCAASGRTFSNYNVGWFRQAPGKEREFVSFISWISDITYYSDSVKGRFIISRDNAKNMVYLQMNSLKPEDTAVYYCAAHPPDPSRGGEWRLQTPSEYDYWGQGTQVTVSSAAAYPYDVPDYGSHHHHHH

SEQ ID NO: 642 - protein, 143 aa, Artificial Sequence
  Synthetic Sequence
QVQLQESGGGLVQAGGSLRLSCAASGHTFSSYTMGWFRQAPGKEREFVAFIDWSGGGTYYADSVKGRFTISRDNAENTVYLQMNNLKPEDTAVYYCAAAQRLGSVTDYTKYDYWGQGTQVTVSSAAAYPYDVPDYGSHHHHHH

SEQ ID NO: 643 - protein, 151 aa, Artificial Sequence
  Synthetic Sequence
QVQLQESGGGLVQAGGSLRLSCAASGRTFSTYPVGWFRQAPGKEREFVAVILWSGVSTYYADSVKGRFTISRDNAQNTVYLQMDSLKPEDTAVYYCAVPRSHFTTAQDMGQDMGAPSWYEYWGQGTQVTVSSAAAYPYDVPDYGSHHHHHH

SEQ ID NO: 644 - protein, 149 aa, Artificial Sequence
  Synthetic Sequence
QVQLQESGGGLVQAGGSLRLSCAASGRTFSNYAMGWFRQAPGKEREFVAAIVWSGGSTYYADSVKGRFTISRDNAKNTVYLQMNSLKPEDTAVYYCAAVLIRYYSGGYQGLSDANEYDYWGQGTQVTVSSAAAYPYDVPDYGSHHHHHH

SEQ ID NO: 645 - protein, 144 aa, Artificial Sequence
  Synthetic Sequence
QVQLQESGGGLVQAGASLRLSCSASGRTFSDYRMGWFRQAPGKEREWVAAISSSGYHTYYADSVKGRFTISRDNAKNTGYLQMSSLKPEDTAVYYCAVVKYLSGSYSYAGQYNFWGQGTQVTVSSAAAYPYDVPDYGSHHHHHH

SEQ ID NO: 646 - protein, 150 aa, Artificial Sequence
  Synthetic Sequence
QVQLQESGGGLVQAGDSLKLSCAASGLTFSNYIMAWFRQAPGKEREGVSCISSPDGSTYYADSVKGRFTISSDNAKNTVYLQMNSLKPEDTAVYYCAADFNVWSPPICGSVGPPPGGMDYWGKGTQVTVSSAAAYPYDVPDYGSHHHHHH

SEQ ID NO: 647 - protein, 148 aa, Artificial Sequence
  Synthetic Sequence
QVQLQESGGGLVQAGGSLRLSCAASGRTFSNSVMGWFRQPPGKEREFVAAVLWSGVSTAYADSVKGRFTISRDNAKNTVYLQMNNLKPDDTAVYYCAAHESTYYSGTYYLTDPRRYVYWGQGTQVTVSSAAAYPYDVPDYGSHHHHHH

SEQ ID NO: 648 - protein, 146 aa, Artificial Sequence
  Synthetic Sequence
QVQLQESGGGLVQAGGSLRLSCVGDGRTFSSYIIGWFRQAPGNEREFVVAITWDGSATTYADSVKGRFTVSRDSAKNTAYLQMNSLKPEDTAVYYCAAVPARGLTMDLENSDIYDHWGRGTQVTVSSAAAYPYDVPDYGSHHHHHH

SEQ ID NO: 649 - protein, 149 aa, Artificial Sequence
  Synthetic Sequence
QVQLQESGGGLVQAGGSLRLSCAASGRTFSSYVMGWFRQALGKEREFVAAIGWNGGITYYADSVKGRFAISRDNAKNTVYLQMNSLKPEDTAVYYCAAATLQVTGSYYLDLSTVDIYDNWGQGTQVTVSSAAAYPYDVPDYGSHHHHHH

SEQ ID NO: 650 - protein, 147 aa, Artificial Sequence
  Synthetic Sequence
QVQLQESGGGLVQAGGSLRLSCAASGGTFSNYVMGWFRQAPGKEREFVGFITWSGASTYYADSVKGRFTISRDNAENTVYLQMNSLKPEDTAVYYCAATLFRSNGPKDLSSGYEYDYWGQGTQVTVSSAAAYPYDVPDYGSHHHHHH

SEQ ID NO: 651 - protein, 140 aa, Artificial Sequence
  Synthetic Sequence
  misc_feature (112)..(112): Xaa can be any naturally occurring amino acid
QVQLQESGGGLVQAGDSLRLTCTASGRTFSNYGIGWFRQAPGKEREFVAGINWSGESADYADSVKGRFTISRDNAKNTVYLQMNSLKPEDTAVYYCAAGESGVWVGGLDYWXQGTQVTVSSAAAYPYDVPDYGSHHHHHH

SEQ ID NO: 652 - protein, 149 aa, Artificial Sequence
  Synthetic Sequence
QVQLQESGGGLVQAGGSLRLSCAASGFTFDDYAIAWFRQAPGKEREGVSCIERSDGSTYYADSVKGRFTISSDNAKNTVYLQMNSLKPEDTAVYYCAVGSANSGEFRFGWVLKPDLYNYWGQGTQVTVSSAAAYPYDVPDYGSHHHHHH

SEQ ID NO: 653 - protein, 150 aa, Artificial Sequence
  Synthetic Sequence
QVQLQESGGGLVQAGGSLRLSCTASGRTFSSYTVAWFRQSPGKEREGISCISNTDSSTYYADSVKGRFTISSDNAKSTVHLQMSSLKPEDTAVYYCAADGNVWSPPICGSAGPPPGGMDYWGKGTQVTVSSAAAYPYDVPDYGSHHHHHH

SEQ ID NO: 654 - protein, 150 aa, Artificial Sequence
  Synthetic Sequence
QVQLQESGGGLVQPGGSLRLSCATFGFPFDDYAIAWFRQAPGKEREGVSCISNTDSSTYYADSVKGRFTISSDNAKNTVHLQMSSLKPEDTAVYYCAADGNVWSPPICGSAGPPPGGMDYWGKGTQVTVSSAAAYPYDVPDYGSHHHHHH

SEQ ID NO: 655 - protein, 147 aa, Artificial Sequence
  Synthetic Sequence
QVQLQESGGGLVQAGGSLRLSCAASGRTFSSYVMGWFRQAPGKEREFVAQISWSAGSIYYADSVKGRFTISNDNAKRTVYLQMNSLKPEDTAVYYCAERGYAYCSDDGCQRTQDYDYWGQGTQVTVSSAAAYPYDVPDYGSHHHHHH

SEQ ID NO: 656 - protein, 148 aa, Artificial Sequence
  Synthetic Sequence
QVQLQESGGGLVQAGGSLRLSCAASGRTLSSNPMAWFRQAAGKEREFVAGMSWNPGPAVYADSVKGRFTISRDSAENTVYLQMNSLKPEDTAVYYCAGAARAWWSGSYDYTRMNNYDYWGPGTQVTVSSAAAYPYDVPDYGSHHHHHH

SEQ ID NO: 657 - protein, 150 aa, Artificial Sequence
  Synthetic Sequence
QVQLQESGGGLVQAGGSLRLSCAVSGFTFDNYAIGWFRQAPGKEREGVSCISRSDGSTYYADSVRGRFTISSDNAKNTVYLQMNSLKPEDTAVYYCAAETSADSGEFRFGWVLKPSLYDYWGQGTQVTVSSAAAYPYDVPDYGSHHHHHH

SEQ ID NO: 658 - protein, 148 aa, Artificial Sequence
  Synthetic Sequence
QVQLQESGGGLVQAGGSLRLSCAASGRAFSSYFMGWFRQTPGKEREFVANIGWTGDMTYYADSVKGRFTISRDNAKNTVYLQMNSLKPEDTAVYYCAAAGSAYSGSYWNITMAANYDYWGQGTQVTVSSAAAYPYDVPDYGSHHHHHH

SEQ ID NO: 659 - protein, 145 aa, Artificial Sequence
  Synthetic Sequence
QVQLQESGGGLVQAGGSLRLSCAASTPTFSSYNMGWFRQAPGKEREFVAAIIWSGSMTYYADSMKGRFTVSIDNAKNTVYLQMNSLKPEDTAVYYCAAQRIFGAQPMDLSGDYEYWGQGTQVTVSSAAAYPYDVPDYGSHHHHHH

SEQ ID NO: 660 - protein, 150 aa, Artificial Sequence
  Synthetic Sequence
QVQLQESGGGLVQAGGSLRLSCATFGFTFDDYAIAWFRQAPGKEREGISCISNTDSSTYYADSVKGRFTISSDSAKNTVHLQMSSLKPEDTAVYYCAADGNVWSPPICGSAGPPPGGMDYWGKGTQVTVSSAAAYPYDVPDYGSHHHHHH

SEQ ID NO: 661 - protein, 145 aa, Artificial Sequence
  Synthetic Sequence
QVQLQESGGGLVQAGGSLRLSCKASGGTFSGYIMGWFRQAPGKEREFVAANTWSGGPTYYSDSVKGRFTISRDNAKNTVYLQMNTLKPEDTAVYQCAARDYRGIKDLDLKGDYDYWGQGTQVTVSSAAAYPYDVPDYGSHHHHHH

SEQ ID NO: 662 - protein, 151 aa, Artificial Sequence
  Synthetic Sequence
QVQLQESGGGLVQAGDSLKLSCATSGRSFSSYTIAWFRQAPGKEREGISCISSDGSTGYADSVRGRFTISSDNAKNTVYLQMNSLKPEDTAVYYCAADFNVWSPPICGSIWYGPPPRGMDYWGKGTQVTVSSAAAYPYDVPDYGSHHHHHH

SEQ ID NO: 663 - protein, 152 aa, Artificial Sequence
  Synthetic Sequence
QVQLQESGGGLVQAGGYLRLSCAASGFSSDDYTIGWFRQAPGKEREGISCYSSSDGSTGFADSVKGRFTISSDNAKNTVYLQMNNLRPEDTAVYYCAADSNVWSPPICGSRWYGPPPGGMAYWGKGTQVTVSSAAAYPYDVPDYGSHHHHHH

SEQ ID NO: 664 - protein, 151 aa, Artificial Sequence
  Synthetic Sequence
QVQLQESGGGLAQVGGSLRLSCTASGFTFDDYTIGWFRQAPGKEREGISCISSDGSTGYADSVKGRFTISSDNAKNTVYLQMNSLKPEDTAVYYCAADFNVWSPPICGSNWYGPPPGGMDYWGKGTQVTVSSAAAYPYDVPDYGSHHHHHH

SEQ ID NO: 665 - protein, 152 aa, Artificial Sequence
  Synthetic Sequence
QVQLQESGGGLVQAGGSLRLSCAASGFSSDDYTIGWFRQAPGKEREGIGCIKSSDGTTGYADSVKGRFTISSDNAKNTVYLQMNSLKPEDTAVYYCAADFNVWSPPICGSIWYGPPPGGMDYWGKGTQVTVSSAAAYPYDVPDYGSHHHHHH

SEQ ID NO: 666 - protein, 150 aa, Artificial Sequence
  Synthetic Sequence
QVQLQESGGGLAQAGGSLRLSCAASGFTFDQYTIAWFRQAPGKEREGVSCISNTDSSTYYADSVKGRFTISSDNAKNTVYLQMSSLKPEDTAVYYCAADGNVWSPPICGSAGPPPGGMDYWGKGTQVTVSSAAAYPYDVPDYGSHHHHHH

SEQ ID NO: 667 - protein, 144 aa, Artificial Sequence
  Synthetic Sequence
QVQLQESGGGLVQAGGSLRLSCAASGRTFSSYAMAWFRQAPGKEREFVAAIAWSAGSTYYADSVKGRFAISRDNAENTVYLQMNSLKPEDTAVYYCAARIITVATMRLDSDYDYWGQGTQVTVSSAAAYPYDVPDYGSHHHHHH

SEQ ID NO: 668 - protein, 150 aa, Artificial Sequence
  Synthetic Sequence
QVQLQESGGGLVQAGGSLRLSCAASGFAFDGYAIGWFRQAPGKEREGVSCISSKEGSTYYADSVKGRFTISSDNAKNTVYLQMSSLKPEDTAVYYCAADGNVWSPPICGSAGPPPGGMDYWGKGTQVTVSSAAAYPYDVPDYGSHHHHHH

SEQ ID NO: 669 - protein, 152 aa, Artificial Sequence
  Synthetic Sequence
QVQLQESGGGLVQAGGSLRLSCAASGFSSDDYTIAWFRRAPGKEREGISCISSSDGSTGYADSVKGRFTITSDSAKNTVYLQMNSLKPEDTAVYYCAADSNVWSPPICGRTWYGPPPGGMDYWGKGTQVTVSSAAAYPYDVPDYGSHHHHHH

SEQ ID NO: 670 - protein, 152 aa, Artificial Sequence
  Synthetic Sequence
QVQLQESGGGLVQPGGSLRLSCAASGFSSDDYTIGWFRQAPGKEREGISCYSSRDGTTGYADSVKGRFTISSDNAKNTVYLQMNSLKPEDTAVYYCAADFNVWSPPICGSIWYGPPPGGMAYWGQGTQVTVSSAAAYPYDVPDYGSHHHHHH

SEQ ID NO: 671 - protein, 151 aa, Artificial Sequence
  Synthetic Sequence
QVQLQESGGGLVQAGGSLRLSCAASGFTFDDYTIGWFRQAPGKEREGISCISSDGSTGYADSVKGRFTISSDNAKNTVYLQMNSLKPEDTAVYYCAADFNVWSPPICGSNWYGPPPGGMDYWGKGTQVTVSSAAAYPYDVPDYGSHHHHHH

SEQ ID NO: 672 - protein, 152 aa, Artificial Sequence
  Synthetic Sequence
QVQLQESGGGLVQAGGSLRLSCAASGFSSDDYTIGWFRQAPGKEREGISCYSSSDGSTGYADSVKGRFTISSDNAKNTVYLQMNSLKPEDTAVYYCAADFNVWSPPICGSSWYGPPPGGMDYWGKGTQVTVSSAAAYPYDVPDYGSHHHHHH

SEQ ID NO: 673 - protein, 152 aa, Artificial Sequence
  Synthetic Sequence
QVQLQESGGGLVQAGGSLRLSCAASGFSSDDYTIGWFRQAPGKEREGISCFSSSDGSTGFADSVKGRFTISSDNATNTVYLEMNSLKPEDTAVYYCAADFNVWSPPICGSRWYGPPPGGMEYWGKGTQVTVSSAAAYPYDVPDYGSHHHHHH

SEQ ID NO: 674 - protein, 150 aa, Artificial Sequence
  Synthetic Sequence
QVQLQESGGGLVQAGGSLRLSCATFGFSFDDYAIAWFRQAPGKEREGISCISNTDSSTFYADSVKGRFTISSDNAKNTVHLQMSSLKPEDTAVYYCAADGNVWSPPICGSAGPPPGGMDYWGKGTQVTVSSAAAYPYDVPDYGSHHHHHH

SEQ ID NO: 675 - protein, 152 aa, Artificial Sequence
  Synthetic Sequence
QVQLQESGGGLVQAGGSLRLSCAASGFSSDDYTIGWFRQAPGKEREGISCYSSSDGSTGFADSVKGRFTISSDNAKNTVYLQMNSLRPEDTAVYYCAADFNVWSPPICGSRWYGPPPGGMAYWGKGTQVTVSSAAAYPYDVPDYGSHHHHHH

SEQ ID NO: 676 - protein, 151 aa, Artificial Sequence
  Synthetic Sequence
QVQLQESGGGLVQVGGSLRLSCTISGFTGNDLAIGWFRQAPGKDQREGISCISNTDSSTYYADSVKGRFTISSDNAKNTVHLQMSSLKPEDTAVYYCAADGNVWSPPICGSAGPPPGGMDYWGKGTQVTVSSAAAYPYDVPDYGSHHHHHH

SEQ ID NO: 677 - protein, 152 aa, Artificial Sequence
  Synthetic Sequence
QVQLQESGGGLVQAGGSLRLSCAASGFSSDDYTIAWFRRAPGKEREGISCISSSDGSTGYADSVKGRFTISSDNAKNTVYLQMTSLKPEDTAVYYCAADSNVWSPPICGKTWYGPPPGGMDYWGKGTQVTVSSAAAYPYDVPDYGSHHHHHH

SEQ ID NO: 678 - protein, 140 aa, Artificial Sequence
  Synthetic Sequence
QVQLQESGGGLVQAGDSLRLSCAGSEGTLSSYGIGWFRQAPGKEREFVGGINWSGDSTDYADSVKGRFTISRDSAKNTVYLQMNSLKPEDTAVYYCAAGESGVWVGGLDYWGQGTQVTVSSAAAYPYDVPDYGSHHHHHH

SEQ ID NO: 679 - protein, 152 aa, Artificial Sequence
  Synthetic Sequence
QVQLQESGGGLVQAGGSLRLSCAASGFSSDDYTIAWFRRAPGKEREGISCFSSSDGSAGYADSVKGRFTVSSDNAKNTVYLQMNSLKPEDTAVYYCAADSNVWSPPICGSTWYGPPPGGMAYWGKGTQVTVSSAAAYPYDVPDYGSHHHHHH

SEQ ID NO: 680 - protein, 150 aa, Artificial Sequence
  Synthetic Sequence
QVQLQESGGGLVQAGGSLRLSCATSGFTFDDYAIAWFRQAPGKEREGVSCISNTDSSTYYADSVKGRFTISSDNAKNTVYLQMSSLKPEDTAVYYCAADGNVWSPPICGSAGPPPGGMDYWGKGTQVTVSSAAAYPYDVPDYGSHHHHHH

SEQ ID NO: 681 - protein, 152 aa, Artificial Sequence
  Synthetic Sequence
QVQLQESGGGLVQAGGSLRLSCEVSGLSSDDYTIGWFRQAPGKEREGFSCFSTRDGNAGYADSVKGRFTISSDNAKNTVYLQMNNLKPEDTAVYYCAADFNVWSPPICGSRWYGPPPGGMDYWGKGTQVTVSSAAAYPYDVPDYGSHHHHHH

SEQ ID NO: 682 - protein, 152 aa, Artificial Sequence
  Synthetic Sequence
QVQLQESGGGLVQAGGSLRLSCEVSGLSSDDYTIGWFRQAPGKKREGFSCFSSRDGSTGYADSVKGRFTISSDNAKNTVYLQMNSLKPEDTAVYYCAADFNVWSPPICGSRWYGPPPGGMDYWGKGTQVTVSSAAAYPYDVPDYGSHHHHHH

SEQ ID NO: 683 - protein, 152 aa, Artificial Sequence
  Synthetic Sequence
QVQLQESGGGLVQAGGSLRLSCAASGFSSDDYTIGWFRQAPGKEREGFSCFSSRDGSTGYADSVKGRFTISSDNAKNTVYLQMNSLKPEDTAVYYCAADFNVWSPPICGSRWYGPPPGGMDYWGKGTQVTVSSAAAYPYDVPDYGSHHHHHH

SEQ ID NO: 684 - protein, 151 aa, Artificial Sequence
  Synthetic Sequence
QVQLQESGGGLVQAGGSLRLSCAASGFSFDDYTIGWFRQVPGKEREGISCISSDGSTGYADSVKGRFTISSDNAKNTVYLQINSLKPEDTAVYYCAADFNVWSPPICGSIWYGPPPGGMDYWGKGTQVTVSSAAAYPYDVPDYGSHHHHHH

SEQ ID NO: 685 - protein, 150 aa, Artificial Sequence
  Synthetic Sequence
QVQLQESGGGLVQAGGSLRLSCATFGFTFDDYAIAWFRQAPGKEREGISCISNTDSSTYYADSVKGRFTISSDNAKNTVHLQMSSLKPEDTAVYYCAADGNVWSPPICGSAGPPPGGMDYWGKGTQVTVSSAAAYPYDVPDYGSHHHHHH

SEQ ID NO: 686 - protein, 150 aa, Artificial Sequence
  Synthetic Sequence
  misc_feature (19)..(19): Xaa can be any naturally occurring amino acid
QVQLQESGGGLVQAGGSLXLSCAASGFTFDDYAIGWFRQAPGKEREGVSCISSPDGSTYYADSVKGRFTISSDNAKNTVYLQMNSLKPEDTAVYYCAADFNVWSPPICGSVGPPPGGMDYWGKGTQVTVSSAAAYPYDVPDYGSHHHHHH

SEQ ID NO: 687 - protein, 152 aa, Artificial Sequence
  Synthetic Sequence
QVQLQESGGGLVQAGASLRLSCKASGFTFGDYTIGWFRQAPGKEREGISCYSSSDGNTGYADSVKGRFTISSDNAKNTVYLQMNSLRPEDTAVYYCAADFNVWSPPICGSSWYGPPPGGMAYWGKGTQVTVSSAAAYPYDVPDYGSHHHHHH

SEQ ID NO: 688 - protein, 140 aa, Artificial Sequence
  Synthetic Sequence
QVQLQESGGGLVQAGDSLRLSCAGSEGTFSSYGIGWFRQAPGKEREFVGGINWSGDSTDYADSVKGRFTISRDNAKNTVYLQMNSLKPEDTAVYYCAAGESGVWVGGLDYWGQGTQVTVSSAAAYPYDVPDYGSHHHHHH

SEQ ID NO: 689 - protein, 152 aa, Artificial Sequence
  Synthetic Sequence
QVQLQESGGGLVQAGGSLRLSCAASGFSSDDYTIGWFRQAPGKEREGISCFSSSDGSTGFADSVKGRFTISSDNATNTVYLQMNSLKPEDTAVYYCAADFNVWSPPICGSSWYGPPPGGMEYWGKGTQVTVSSAAAYPYDVPDYGSHHHHHH

SEQ ID NO: 690 - protein, 150 aa, Artificial Sequence
  Synthetic Sequence
QVQLQESGGGLVQAGDSLRLSCTASGVSIGDYNIGWFRQAPGKEREGVSCISSGDGTTYYTDSVKGRFTISTDNAKNTVYLQMNSLKPEDTAVYYCAADGNVWSPPICGSAGPPPGGMDYWGKGTQVTVSSAAAYPYDVPDYGSHHHHHH

SEQ ID NO: 691 - protein, 152 aa, Artificial Sequence
  Synthetic Sequence
QVQLQESGGGLVQAGGSLRLSCAASGFTFDDYTIAWFRQAPGGKEREGISCISSDGSTGYADSVKGRFTISSDNAKNMVYLQMNSLKPEDTALYYCAADFNVWSPPICSSNWYGPPPRGMDYWGKGTQVTVSSAAAYPYDVPDYGSHHHHHH

SEQ ID NO: 692 - protein, 151 aa, Artificial Sequence
  Synthetic Sequence
QVQLQESGGGLVQAGGSLRLSCAASGFTFDDYTIAWFRQAPGKEREGISCISSDGSTGYADSVRGRFTISSDNAKNTVYLQMNSLKPEDTAVYYCAADFNVWSPPICGSIWYGPPPRGMDYWGKGTQVTVSSAAAYPYDVPDYGSHHHHHH

SEQ ID NO: 693 - protein, 118 aa, Artificial Sequence
  Synthetic Sequence
EVQLVESGGGLVQPGGSLRLSCAASGFNIKDTYIHWVRQAPGKGLEWVARIDPANDNTLYASKFQGRATISADTSKNTAYLQMNSLRAEDTAVYYCGRGYGYYVFDHWGQGTLVTVSS

SEQ ID NO: 694 - protein, 118 aa, Artificial Sequence
  Synthetic Sequence
QVQLVQSGAEVKKPGATVKISCKVSGFNIKDTYIHWVQQAPGKGLEWMGRIDPANDNTLYASKFQGRVTITADTSTDTAYMELSSLRSEDTAVYYCARGYGYYVFDHWGQGTLVTVSS

SEQ ID NO: 695 - protein, 107 aa, Artificial Sequence
  Synthetic Sequence
DVQITQSPSSLSASVGDRVTITCRTSRSISQYLAWYQQKPGKVPKLLIYSGSTLQSGVPSRFSGSGSGTDFTLTISSLQPEDVATYYCQQHNENPLTFGGGTKVEIK

SEQ ID NO: 696 - protein, 288 aa, Homo sapiens
  MISC_FEATURE: human PD-1
MQIPQAPWPVVWAVLQLGWRPGWFLDSPDRPWNPPTFSPALLVVTEGDNATFTCSFSNTSESFVLNWYRMSPSNQTDKLAAFPEDRSQPGQDCRFRVTQLPNGRDFHMSVVRARRNDSGTYLCGAISLAPKAQIKESLRAELRVTERRAEVPTAHPSPSPRPAGQFQTLVVGVVGGLLGSLVLLVWVLAVICSRAARGTIGARRTGQPLKEDPSAVPVFSVDYGELDFQWREKTPEPPVPCVPEQTEYATIVFPSGMGTSSPARRGSADGPRSAQPLRPEDGHCSWPL

SEQ ID NO: 697 - protein, 10 aa, Artificial Sequence
  Synthetic Sequence
GFSMDYYAIA

SEQ ID NO: 698 - protein, 10 aa, Artificial Sequence
  Synthetic Sequence
GFSMDYYAIA

SEQ ID NO: 699 - protein, 10 aa, Artificial Sequence
  Synthetic Sequence
GFSVDYYAIA

SEQ ID NO: 700 - protein, 10 aa, Artificial Sequence
  Synthetic Sequence
GFSMDYYAIA

SEQ ID NO: 701 - protein, 10 aa, Artificial Sequence
  Synthetic Sequence
GGFNRVSYMG

SEQ ID NO: 702 - protein, 10 aa, Artificial Sequence
  Synthetic Sequence
GGFNRVSYMG

SEQ ID NO: 703 - protein, 10 aa, Artificial Sequence
  Synthetic Sequence
GIIKSINFMG

SEQ ID NO: 704 - protein, 10 aa, Artificial Sequence
  Synthetic Sequence
GFILDYYGIG

SEQ ID NO: 705 - protein, 10 aa, Artificial Sequence
  Synthetic Sequence
GLSLDYDGVG

SEQ ID NO: 706 - protein, 10 aa, Artificial Sequence
  Synthetic Sequence
GFILDYYGIG

SEQ ID NO: 707 - protein, 10 aa, Artificial Sequence
  Synthetic Sequence
GRTFSSLGMG

SEQ ID NO: 708 - protein, 10 aa, Artificial Sequence
  Synthetic Sequence
GRTFSSLGMG

SEQ ID NO: 709 - protein, 10 aa, Artificial Sequence
  Synthetic Sequence
GFAFGSYDMG

SEQ ID NO: 710 - protein, 10 aa, Artificial Sequence
  Synthetic Sequence
GFSFGNNDMS

SEQ ID NO: 711 - protein, 11 aa, Artificial Sequence
  Synthetic Sequence
CITGSDFMVDT

SEQ ID NO: 712 - protein, 11 aa, Artificial Sequence
  Synthetic Sequence
CITGSDFMVDT

SEQ ID NO: 713 - protein, 11 aa, Artificial Sequence
  Synthetic Sequence
CITGSDFMVDT

SEQ ID NO: 714 - protein, 11 aa, Artificial Sequence
  Synthetic Sequence
CITGSDFMVDT

SEQ ID NO: 715 - protein, 8 aa, Artificial Sequence
  Synthetic Sequence
SVTSGGEI

SEQ ID NO: 716 - protein, 8 aa, Artificial Sequence
  Synthetic Sequence
SVTSGGEI

SEQ ID NO: 717 - protein, 8 aa, Artificial Sequence
  Synthetic Sequence
STTSDGRT

SEQ ID NO: 718 - protein, 9 aa, Artificial Sequence
  Synthetic Sequence
CISSSDGST

SEQ ID NO: 719 - protein, 9 aa, Artificial Sequence
  Synthetic Sequence
CISSSDGST

SEQ ID NO: 720 - protein, 9 aa, Artificial Sequence
  Synthetic Sequence
CISSSDGST

SEQ ID NO: 721 - protein, 9 aa, Artificial Sequence
  Synthetic Sequence
AIAWNGAST

SEQ ID NO: 722 - protein, 9 aa, Artificial Sequence
  Synthetic Sequence
AIAWNGAST

SEQ ID NO: 723 - protein, 9 aa, Artificial Sequence
  Synthetic Sequence
GINSGGRIT

SEQ ID NO: 724 - protein, 9 aa, Artificial Sequence
  Synthetic Sequence
AINSGGGST

SEQ ID NO: 725 - protein, 19 aa, Artificial Sequence
  Synthetic Sequence
AVRSTANTLCPSHYSVMDY

SEQ ID NO: 726 - protein, 19 aa, Artificial Sequence
  Synthetic Sequence
AVRSTANTLCPSHYSVMDY

SEQ ID NO: 727 - protein, 19 aa, Artificial Sequence
  Synthetic Sequence
AVRSTANTLCPSHYSIMDY

SEQ ID NO: 728 - protein, 19 aa, Artificial Sequence
  Synthetic Sequence
AVRSTANTLCPSHYSVMDY

SEQ ID NO: 729 - protein, 14 aa, Artificial Sequence
  Synthetic Sequence
NADIWVSDARMYNY

SEQ ID NO: 730 - protein, 14 aa, Artificial Sequence
  Synthetic Sequence
NADIWVSDARMYNY

SEQ ID NO: 731 - protein, 14 aa, Artificial Sequence
  Synthetic Sequence
NADIWLPSDRMYNY

SEQ ID NO: 732 - protein, 13 aa, Artificial Sequence
  Synthetic Sequence
ATATLCDGGIWGY

SEQ ID NO: 733 - protein, 13 aa, Artificial Sequence
  Synthetic Sequence
ATATLCDGGIWGY

SEQ ID NO: 734 - protein, 13 aa, Artificial Sequence
  Synthetic Sequence
ATATLCDGGIWGY

SEQ ID NO: 735 - protein, 17 aa, Artificial Sequence
  Synthetic Sequence
AASGLGSVVVTANEYDY

SEQ ID NO: 736 - protein, 17 aa, Artificial Sequence
  Synthetic Sequence
AASGLGSVVVTANEYDY

SEQ ID NO: 737 - protein, 15 aa, Artificial Sequence
  Synthetic Sequence
AQGDRSSWHYYGMDY

SEQ ID NO: 738 - protein, 13 aa, Artificial Sequence
  Synthetic Sequence
ATKSDPMTNEYDL

SEQ ID NO: 739 - protein, 147 aa, Artificial Sequence
  Synthetic Sequence
QVQLQESGGGLVQPGGSLRLSCAASGFSMDYYAIAWFRQAPGKEREEISCITGSDFMVDTYYVASVKGRFTISRDNAENTAYLQMNNLKPEDTGVYFCAVRSTANTLCPSHYSVMDYWGKGTQVTVSSAAAYPYDVPDYGSHHHHHH

SEQ ID NO: 740 - protein, 147 aa, Artificial Sequence
  Synthetic Sequence
QVQLQESGGGLVQAGGSLRLSCAASGFSMDYYAIAWFRQAPGKEREEISCITGSDFMVDTYYVASVKGRFTISRDNAENTAYLQMNNLKPEDTGVYFCAVRSTANTLCPSHYSVMDYWGKGTQVTVSSAAAYPYDVPDYGSHHHHHH

SEQ ID NO: 741 - protein, 147 aa, Artificial Sequence
  Synthetic Sequence
QVQLQESGGGLVQPGGSLRLSCSASGFSVDYYAIAWFRQAPGKEREEISCITGSDFMVDTYYVASVKGRFTISRDNAKNTAYLQMNSLKPEDTGVYFCAVRSTANTLCPSHYSIMDYWGKGTQVTVSSAAAYPYDVPDYGSHHHHHH

SEQ ID NO: 742 - protein, 147 aa, Artificial Sequence
  Synthetic Sequence
QVQLQESGGGLVQPGGSLRLSCSASGFSMDYYAIAWFRQAPGKEREEISCITGSDFMVDTYYVASVKGRFTISRDNAKNTAHLQMNSLKPEDTGVYFCAVRSTANTLCPSHYSVMDYWGKGTQVTVSSAAAYPYDVPDYGSHHHHHH

SEQ ID NO: 743 - protein, 139 aa, Artificial Sequence
  Synthetic Sequence
QVQLQESGGGLVQAGGSLRLSCAASGGFNRVSYMGWYRQAPGTKRELVASVTSGGEITIADSVKGRFTVSRDNSKNTLYLQMNGLKPEDGATYWCNADIWVSDARMYNYWGQGTQVTVSSAAAYPYDVPDYGSHHHHHH

SEQ ID NO: 744 - protein, 139 aa, Artificial Sequence
  Synthetic Sequence
QVQLQESGGGLVQTGESLRLSCAASGGFNRVSYMGWYRQAPGSKRELVASVTSGGEITVADSVKGRFTVSRDNNKNTLYLQMNGLKPEDGATYWCNADIWVSDARMYNYWGQGTQVTVSSAAAYPYDVPDYGSHHHHHH

SEQ ID NO: 745 - protein, 139 aa, Artificial Sequence
  Synthetic Sequence
QVQLQESGGGLVQTGESLRLSCAASGIIKSINFMGWYRQPPGTKRELVASTTSDGRTTVADSVKGRFTISRDNAKNTIYLEMSSLKPEDTATYWCNADIWLPSDRMYNYWGQGTQVTVSSAAAYPYDVPDYGSHHHHHH

SEQ ID NO: 746 - protein, 139 aa, Artificial Sequence
  Synthetic Sequence
QVQLQESGGGLVQAGGSLRLSCAVSGFILDYYGIGWFRQAPGKEREAVSCISSSDGSTYYADSVKGRFTISRDNALNTLYLQMNSLKPEDTAVYHCATATLCDGGIWGYWGQGTQVTVSSAAAYPYDVPDYGSHHHHHH

SEQ ID NO: 747 - protein, 139 aa, Artificial Sequence
  Synthetic Sequence
QVQLQESGGGLAQAGGSLRLSCEGSGLSLDYDGVGWFRQAPGKEREAVSCISSSDGSTYYADSVKGRFTISRGNALNTLYLQMNSLKPEDTAVYYCATATLCDGGIWGYWGQGTQVTVSSAAAYPYDVPDYGSHHHHHH

SEQ ID NO: 748 - protein, 139 aa, Artificial Sequence
  Synthetic Sequence
QVQLQESGGGSVQPGGSLRLSCAVSGFILDYYGIGWFRQAPGKEREAVSCISSSDGSTYYADSVKGRFTISRDNALNTLYLQMNSLKPEDTAVYYCATATLCDGGIWGYWGQGTQVTVSSAAAYPYDVPDYGSHHHHHH

SEQ ID NO: 749 - protein, 143 aa, Artificial Sequence
  Synthetic Sequence
QVQLQESGGGSVQAGDSLRLSCTASGRTFSSLGMGWFRQAPGKEREFVSAIAWNGASTYYTESVKGRFTISRDDAKNTVYLQMNSLKPTDTAVYFCAASGLGSVVVTANEYDYWGQGTQVTVSSAAAYPYDVPDYGSHHHHHH

SEQ ID NO: 750 - protein, 143 aa, Artificial Sequence
  Synthetic Sequence
QVQLQESGGGSVQPGKSLRLSCAASGRTFSSLGMGWFRQAPGKEREFVSAIAWNGASTYYTESVKGRFTISRDDAKNTVYLQMNSLKPTDTAVYFCAASGLGSVVVTANEYDYWGQGTQVTVSSAAAYPYDVPDYGSHHHHHH

SEQ ID NO: 751 - protein, 141 aa, Artificial Sequence
  Synthetic Sequence
QVQLQESGGGLVQPGGSLRLSCTTSGFAFGSYDMGWVRQAPGKGPEWVSGINSGGRITDYADSVTGRFTISRDNAKNTLYLQMNSLKPEDTAVYYCAQGDRSSWHYYGMDYWGKGTQVTVSSAAAYPYDVPDYGSHHHHHH

SEQ ID NO: 752 - protein, 139 aa, Artificial Sequence
  Synthetic Sequence
  misc_feature (112)..(112): Xaa can be any naturally occurring amino acid
QVQLQESGGGLVQPGGSLRLSCAASGFSFGNNDMSWVRQAPGKGPEWVSAINSGGGSTYYADSVKGRFTISRDNAKNTLYLQMNSLKPEDTAVYYCATKSDPMTNEYDLWGXGTQVTVSSAAAYPYDVPDYGSHHHHHH

SEQ ID NO: 753 - protein, 447 aa, Artificial Sequence
  Synthetic Sequence
QVQLVQSGVEVKKPGASVKVSCKASGYTFTNYYMYWVRQAPGQGLEWMGGINPSNGGTNFNEKFKNRVTLTTDSSTTTAYMELKSLQFDDTAVYYCARRDYRFDMGFDYWGQGTTVTVSSASTKGPSVFPLAPCSRSTSESTAALGCLVKDYFPEPVTVSWNSGALTSGVHTFPAVLQSSGLYSLSSVVTVPSSSLGTKTYTCNVDHKPSNTKVDKRVESKYGPPCPPCPAPEFLGGPSVFLFPPKPKDTLMISRTPEVTCVVVDVSQEDPEVQFNWYVDGVEVHNAKTKPREEQFNSTYRVVSVLTVLHQDWLNGKEYKCKVSNKGLPSSIEKTISKAKGQPREPQVYTLPPSQEEMTKNQVSLTCLVKGFYPSDIAVEWESNGQPENNYKTTPPVLDSDGSFFLYSRLTVDKSRWQEGNVFSCSVMHEALHNHYTQKSLSLSLGK

SEQ ID NO: 754 - protein, 218 aa, Artificial Sequence
  Synthetic Sequence
EIVLTQSPATLSLSPGERATLSCRASKGVSTSGYSYLHWYQQKPGQAPRLLIYLASYLESGVPARFSGSGSGTDFTLTISSLEPEDFAVYYCQHSRDLPLTFGGGTKVEIKRTVAAPSVFIFPPSDEQLKSGTASVVCLLNNFYPREAKVQWKVDNALQSGNSQESVTEQDSKDSTYSLSSTLTLSKADYEKHKVYACEVTHQGLSSPVTKSFNRGEC

SEQ ID NO: 755 - protein, 440 aa, Artificial Sequence
  Synthetic Sequence
QVQLVESGGGVVQPGRSLRLDCKASGITFSNSGMHWVRQAPGKGLEWVAVIWYDGSKRYYADSVKGRFTISRDNSKNTLFLQMNSLRAEDTAVYYCATNDDYWGQGTLVTVSSASTKGPSVFPLAPCSRSTSESTAALGCLVKDYFPEPVTVSWNSGALTSGVHTFPAVLQSSGLYSLSSVVTVPSSSLGTKTYTCNVDHKPSNTKVDKRVESKYGPPCPPCPAPEFLGGPSVFLFPPKPKDTLMISRTPEVTCVVVDVSQEDPEVQFNWYVDGVEVHNAKTKPREEQFNSTYRVVSVLTVLHQDWLNGKEYKCKVSNKGLPSSIEKTISKAKGQPREPQVYTLPPSQEEMTKNQVSLTCLVKGFYPSDIAVEWESNGQPENNYKTTPPVLDSDGSFFLYSRLTVDKSRWQEGNVFSCSVMHEALHNHYTQKSLSLSLGK

SEQ ID NO: 756 - protein, 214 aa, Artificial Sequence
  Synthetic Sequence
EIVLTQSPATLSLSPGERATLSCRASQSVSSYLAWYQQKPGQAPRLLIYDASNRATGIPARFSGSGSGTDFTLTISSLEPEDFAVYYCQQSSNWPRTFGQGTKVEIKRTVAAPSVFIFPPSDEQLKSGTASVVCLLNNFYPREAKVQWKVDNALQSGNSQESVTEQDSKDSTYSLSSTLTLSKADYEKHKVYACEVTHQGLSSPVTKSFNRGEC

SEQ ID NO: 757 - protein, 106 aa, Artificial Sequence
  Synthetic Sequence
EIVLTQSPSSLSASVGDRVTITCSARSSVSYMHWYQQKPGKAPKLLIYRTSNLASGVPSRFSGSGSGTDFTLTINSLQPEDFATYYCQQRSSFPLTFGGGTKLEIK

SEQ ID NO: 758 - protein, 106 aa, Artificial Sequence
  Synthetic Sequence
EIVLTQSPSSLSASVGDRVTITCSARSSVSYMHWFQQKPGKAPKLWIYRTSNLASGVPSRFSGSGSGTDYTLTINSLQPEDFATYYCQQRSSFPLTFGGGTKLEIK

SEQ ID NO: 759 - protein, 106 aa, Artificial Sequence
  Synthetic Sequence
EIVLTQSPSSLSASVGDRVTITCSARSSVSYMHWFQQKPGKAPKLWIYRTSNLASGVPSRFSGSGSGTDYCLTINSLQPEDFATYYCQQRSSFPLTFGGGTKLEIK

SEQ ID NO: 760 - protein, 106 aa, Artificial Sequence
  Synthetic Sequence
EIVLTQSPSSLSASVGDRVTITCSARSSVSYMHWFQQKPGKAPKLWIYRTSNLASGVPSRFSGSGSGTSYCLTINSLQPEDFATYYCQQRSSFPLTFGGGTKLEIK

SEQ ID NO: 761 - protein, 117 aa, Artificial Sequence
  Synthetic Sequence
QVQLVQSGSELKKPGASVKISCKASGYSFSNYGMNWVRQAPGQGLQWMGWINTDSGESTYAEEFKGRFVFSLDTSVSTAYLQITSLTAEDTGMYFCAKVGYDALDYWGQGTLVTVSS

SEQ ID NO: 762 - protein, 117 aa, Artificial Sequence
  Synthetic Sequence
QVQLVQSGSELKKPGASVKISCKASGYTFTNYGMNWVRQAPGQGLQWMGWINTDSGESTYAEEFKGRFVFSLDTSVSTAYLQITSLTAEDTGMYFCAKVGYDALDYWGQGTLVTVSS

SEQ ID NO: 763 - protein, 117 aa, Artificial Sequence
  Synthetic Sequence
QVQLVQSGSELKKPGASVKISCKASGYTFTNYGMNWVRQAPGQGLQWMGWINTDSGESTYAEEFKGRFVFSLDTSVNTAYLQITSLTAEDTGMYFCVRVGYDALDYWGQGTLVTVSS

SEQ ID NO: 764 - protein, 117 aa, Artificial Sequence
  Synthetic Sequence
QIQLVQSGSELKKPGASVKISCKASGYTFTNYGMNWVRQAPGQGLQWMGWINTDSGESTYAEEFKGRFVFSLDTSVNTAYLQITSLTAEDTGMYFCVRVGYDALDYWGQGTLVTVSS

SEQ ID NO: 765 - protein, 117 aa, Artificial Sequence
  Synthetic Sequence
QIQLVQSGSELKKPGASVKISCKASGYTFTNYGMNWVKQAPGQGLKWMGWINTDSGESTYAEEFKGRFAFSLDTSVNTAYLQITSLNAEDTGMYFCVRVGYDALDYWGQGTLVTVSS

SEQ ID NO: 766 - protein, 254 aa, Artificial Sequence
  Synthetic Sequence
LFTVTVPKELYIIEHGSNVTLECNFDTGSHVNLGAITASLQKVENDTSPHRERATLLEEQLPLGKASFHIPQVQVRDEGQYQCIIIYGVAWDYKYLTLKVKASYRKINTHILKVPETDEVELTCQATGYPLAEVSWPNVSVPANTSHSRTPEGLYQVTSVLRLKPPPGRNFSCVFWNTHVRELTLASIDLQSQMEPRTHPTWLLHIFIPFCIIAFIFIATVIALRKQLCQKLYSSKDTTKRPVTTTKREVNSAI

SEQ ID NO: 767 - protein, 453 aa, Artificial Sequence
  Synthetic Sequence
MIFLLLMLSLELQLHQIAALFTVTVPKELYIIEHGSNVTLECNFDTGSHVNLGAITASLQKVENDTSPHRERATLLEEQLPLGKASFHIPQVQVRDEGQYQCIIIYGVAWDYKYLTLKVKASYRKINTHILKVPETDEVELTCQATGYPLAEVSWPNVSVPANTSHSRTPEGLYQVTSVLRLKPPPGRNFSCVFWNTHVRELTLASIDLQSQMEPRTHPTWEPKSCDKTHTCPPCPAPELLGGPSVFLFPPKPKDTLMISRTPEVTCVVVDVSHEDPEVKFNWYVDGVEVHNAKTKPREEQYNSTYRVVSVLTVLHQDWLNGKEYKCKVSNKALPAPIEKTISKAKGQPREPQVYTLPPSRDELTKNQVSLTCLVKGFYPSDIAVEWESNGQPENNYKTTPPVLDSDGSFFLYSKLTVDKSRWQQGNVFSCSVMHEALHNHYTQKSLSLSPGK

SEQ ID NO: 768 - protein, 119 aa, Artificial Sequence
  Synthetic Sequence
EVQLQQSGPVLVKPGASVKMSCKASGYTFTDYYMNWVKQSHGKSLEWIGNINPYNGGTTYNQKFKGKATLTVDKSSRTAYMEINSLTSEDSAVYYCARGRIYDGSLDYWGQGTALTVSS

SEQ ID NO: 769 - protein, 106 aa, Artificial Sequence
  Synthetic Sequence
DIQMTQFPSSLCASQGGKVTVTCKASQDINNYMAWYQHKPGKGPRLLIHYTSTLLSGIPSRFSGSGSGRDYSFSISNLEPEDIATYYCLQYDNLWTFGGGTKLEIK

SEQ ID NO: 770 - protein, 116 aa, Artificial Sequence
  Synthetic Sequence
QVQLQQSGAELAKPGASVRLSCKASGYTFTNYWMHWVKQRPGQGLEWIGHINPSSGFTTYNQNFKDKATLTADKSSNTAYMQLSSLTYEDSAVYFCAREDYDVDYWGQGTTLTVSS

SEQ ID NO: 771 - protein, 107 aa, Artificial Sequence
  Synthetic Sequence
DIVMTQSQKFMSTSVGDRVSVTCKASQSVDTNVAWYQQKPGQSPKALIFSASYRYSGVPDRFTGSGSGTDFTLTINSVQSEDLAEYFCQQYNSYPYTFGSGTKLEIK

SEQ ID NO: 772 - protein, 122 aa, Artificial Sequence
  Synthetic Sequence
EVQLVESGGGLVKPGGSLKLSCAASGFTFSDYGMHWVRQAPEKGLEWVAYISSGSYTIYYTDTVKGRFTISRDNAKNTLFLQMTSLRSEDTAMYYCARRGYGSFYEYYFDYWGQGTTLTVSS

SEQ ID NO: 773 - protein, 106 aa, Artificial Sequence
  Synthetic Sequence
QIVLTQSPALMSASPGEKVTMTCSASSSVSYMYWYQQKPRSSPKPWIYLTSNLASGVPARFSGSGSGTSYSLTISSMEAEDAATYYCQQWSSNPFTFGSGTKLEIK

SEQ ID NO: 774 - protein, 119 aa, Artificial Sequence
  Synthetic Sequence
EVQLVESGGGLVQAGKSLRLSCAASGSIFSIHAMGWFRQAPGKEREFVAAITWSGGITYYEDSVKGRFTISRDNAKNTVYLQMNSLKPEDTAIYYCAADRAESSWYDYWGQGTQVTVSS

SEQ ID NO: 775 - protein, 119 aa, Artificial Sequence
  Synthetic Sequence
EVQLVESGGGLVQAGGSLRLSCAASGSIASIHAMGWFRQAPGKEREFVAVITWSGGITYYADSVKGRFTISRDNAKNTVYLQMNSLKPEDTAIYYCAGDKHQSSWYDYWGQGTQVTVSS

SEQ ID NO: 776 - protein, 119 aa, Artificial Sequence
  Synthetic Sequence
EVQLVESGGGLVQAGGSLRLSCAASGSISSIHAMGWFRQAPGKEREFVAAITWSGGITYYADSLKGRFTISRDNAKNTGYLQMNSLKPEDTAIYYCAADRAQSSWYDYWGQGTQVTVSS

SEQ ID NO: 777 - protein, 119 aa, Artificial Sequence
  Synthetic Sequence
EVQLVESGGGLVQAGGSLGLSCAASGSIFSINAMAWFRQAPGKEREFVALISWSGGSTYYEDSVKGRFTISRDNAKNTVYLQMNSLKPEDTAIYYCAADRVDSNWYDYWGQGTQVTVSS

SEQ ID NO: 778 - protein, 120 aa, Artificial Sequence
  Synthetic Sequence
EVQLVESGGGLVQAGGSLRLSCAASGRAFSSGTMGWFRRAPGKEREFVASIPWSGGRIYYADSVKGRFTISRDNAQNTVYLQMNSLKPEDTAVYYCAVKERSTGWDFASWGQCTQVTVSS

SEQ ID NO: 779 - protein, 121 aa, Artificial Sequence
  Synthetic Sequence
QVQLVQSGAELKQPGASVKMSCKASGYSFTSSWIHWVKQAPGQGLEWIGYIYPSTGFTEYNQKFKDRATLTADKSTSTAYMELSSLRSEDSAVYYCARWRDSSGYHAMDYWGQGTSVTVSS

SEQ ID NO: 780 - protein, 122 aa, Artificial Sequence
  Synthetic Sequence
QVQLVQSGAEVKQPGASVKMSCKASGYSFTSSWIHWVKQAPGQGLEWIGYIYPSTGFTEYNQKFKDRATLTADKSTSTAYMELSSLRSEDTAVYYDCARWRDSSGYHAMDYWGQGTSVTVSS

SEQ ID NO: 781 - protein, 121 aa, Artificial Sequence
  Synthetic Sequence
QVQLVQSGHEVKQPGASVKMSCKASGYSFTSSWIHWVKQAPGQGLEWIGYIYPSTGFTEYNQKFKDRATLTADKSTSTAYMELSSLRSEDTAVYYCARWRDSSGYHAMDYWGQGTLVTVSS

SEQ ID NO: 782 - protein, 121 aa, Artificial Sequence
  Synthetic Sequence
QVQLVQSGHEVKQPGASVKMSCKASGYSFTSSWIHWVRQAPGQGLEWIGYIYPSTGFTEYNQKFKDRATLTADKSTSTAYMELSSLRSEDTAVYYCARWRDSSGYHAMDYWGQGTLVTVSS

SEQ ID NO: 783 - protein, 121 aa, Artificial Sequence
  Synthetic Sequence
QVQLVQSGHEVKQPGASVKVSCKASGYSFTSSWIHWVRQAPGQGLEWIGYIYPSTGFTEYNQKFKDRATITADKSTSTAYMELSSLRSEDTAVYYCARWRDSSGYHAMDYWGQGTLVTVSS

SEQ ID NO: 784 - protein, 111 aa, Artificial Sequence
  Synthetic Sequence
DIVLTQSPASLTLSPGQRLTISCRASQSVSTSGYSYMHWYQQKPDQSPKLLIKFGSNLESGIPARFSGSGSGTDFTLTISSLEEEDFATYYCQHSWEIPYTFGQGTKLEIK

SEQ ID NO: 785 - protein, 111 aa, Artificial Sequence
  Synthetic Sequence
DIVLTQSPATLSLSPGQRLTISCRASQSVSTSGYSYMHWYQQKPDQSPKLLIKFGSNLESGIPARFSGSGSGTDFTLTISSLEPEDFATYYCQHSWEIPYTFGQGTKLEIK

SEQ ID NO: 786 - protein, 111 aa, Artificial Sequence
  Synthetic Sequence
EIVLTQSPATLSLSPGQRLTISCRASQSVSTSGYSYMHWYQQKPDQSPKLLIKFGSNLESGIPARFSGSGSGTDFTLTISSLEPEDFATYYCQHSWEIPYTFGQGTKLEIK

SEQ ID NO: 787 - protein, 111 aa, Artificial Sequence
  Synthetic Sequence
DIVLTQSPATLSLSPGQRLTISCRASQSVSTSGYSYMHWYQQKPDQSPKLLIKFGSNLESGIPARFSGSGSGTDFTLTISSLEPEDFAVYYCQHSWEIPYTFGQGTKLEIK

SEQ ID NO: 788 - protein, 290 aa, Homo sapiens
MRIFAVFIFMTYWHLLNAFTVTVPKDLYVVEYGSNMTIECKFPVEKQLDLAALIVYWEMEDKNIIQFVHGEEDLKVQHSSYRQRARLLKDQLSLGNAALQITDVKLQDAGVYRCMISYGGADYKRITVKVNAPYNKINQRILVVDPVTSEHELTCQAEGYPKAEVIWTSSDHQVLSGKTTTTNSKREEKLFNVTSTLRINTTTNEIFYCTFRRLDPEENHTAELVIPELPLAHPPNERTHLVILGAILLCLGVALTFIFRLRKGRMMDVKKCGIQDTNSKKQSDTHLEET

SEQ ID NO: 789 - protein, 176 aa, Homo sapiens
MRIFAVFIFMTYWHLLNAPYNKINQRILVVDPVTSEHELTCQAEGYPKAEVIWTSSDHQVLSGKTTTTNSKREEKLFNVTSTLRINTTTNEIFYCTFRRLDPEENHTAELVIPELPLAHPPNERTHLVILGAILLCLGVALTFIFRLRKGRMMDVKKCGIQDTNSKKQSDTHLEET

SEQ ID NO: 790 - protein, 178 aa, Homo sapiens
MRIFAVFIFMTYWHLLNAFTVTVPKDLYVVEYGSNMTIECKFPVEKQLDLAALIVYWEMEDKNIIQFVHGEEDLKVQHSSYRQRARLLKDQLSLGNAALQITDVKLQDAGVYRCMISYGGADYKRITVKVNAPYNKINQRILVVDPVTSEHELTCQAEGYPKAEVIWTSSDHQVLSGD

SEQ ID NO: 791 - protein, 10 aa, Artificial Sequence
  Synthetic Sequence
GFTLDYYAIG

SEQ ID NO: 792 - protein, 10 aa, Artificial Sequence
  Synthetic Sequence
GTIFSINHMD

SEQ ID NO: 793 - protein, 10 aa, Artificial Sequence
  Synthetic Sequence
GFTFDDYGMS

SEQ ID NO: 794 - protein, 10 aa, Artificial Sequence
  Synthetic Sequence
GFTLDYYAIN

SEQ ID NO: 795 - protein, 10 aa, Artificial Sequence
  Synthetic Sequence
GTIFSINRMD

SEQ ID NO: 796 - protein, 10 aa, Artificial Sequence
  Synthetic Sequence
GFTFSSYGMS

SEQ ID NO: 797 - protein, 10 aa, Artificial Sequence
  Synthetic Sequence
GKIFSGNDMG

SEQ ID NO: 798 - protein, 10 aa, Artificial Sequence
  Synthetic Sequence
GTIFSINRMD

SEQ ID NO: 799 - protein, 10 aa, Artificial Sequence
  Synthetic Sequence
GFTFSSYGMS

SEQ ID NO: 800 - protein, 10 aa, Artificial Sequence
  Synthetic Sequence
GFTFNDYAMS

SEQ ID NO: 801 - protein, 10 aa, Artificial Sequence
  Synthetic Sequence
GFNLDPYAIA

SEQ ID NO: 802 - protein, 10 aa, Artificial Sequence
  Synthetic Sequence
GFTFTAYAMS

SEQ ID NO: 803 - protein, 10 aa, Artificial Sequence
  Synthetic Sequence
GFTFDYYAIG

SEQ ID NO: 804 - protein, 10 aa, Artificial Sequence
  Synthetic Sequence
GFNLDPYAIA

SEQ ID NO: 805 - protein, 10 aa, Artificial Sequence
  Synthetic Sequence
GTIFSINRMD

SEQ ID NO: 806 - protein, 10 aa, Artificial Sequence
  Synthetic Sequence
GTIFSINRMD

SEQ ID NO: 807 - protein, 10 aa, Artificial Sequence
  Synthetic Sequence
GFTFSSYGMS

SEQ ID NO: 808 - protein, 10 aa, Artificial Sequence
  Synthetic Sequence
GFNLDPYAIG

SEQ ID NO: 809 - protein, 10 aa, Artificial Sequence
  Synthetic Sequence
GFNLDPYAIA

SEQ ID NO: 810 - protein, 10 aa, Artificial Sequence
  Synthetic Sequence
ESIFSIEAMG

SEQ ID NO: 811 - protein, 10 aa, Artificial Sequence
  Synthetic Sequence
GKIFSGNDMG

SEQ ID NO: 812 - protein, 10 aa, Artificial Sequence
  Synthetic Sequence
GFTLDYYAIG

SEQ ID NO: 813 - protein, 10 aa, Artificial Sequence
  Synthetic Sequence
GFTFSSYGMS

SEQ ID NO: 814 - protein, 10 aa, Artificial Sequence
  Synthetic Sequence
GTIFSINRMD

SEQ ID NO: 815 - protein, 10 aa, Artificial Sequence
  Synthetic Sequence
GFTFSSYGMS

SEQ ID NO: 816 - protein, 10 aa, Artificial Sequence
  Synthetic Sequence
GFNLDPYAIA

SEQ ID NO: 817 - protein, 10 aa, Artificial Sequence
  Synthetic Sequence
GRTFSISAMG

SEQ ID NO: 818 - protein, 10 aa, Artificial Sequence
  Synthetic Sequence
GFTLDYYAIN

SEQ ID NO: 819 - protein, 10 aa, Artificial Sequence
  Synthetic Sequence
GFTFSSYGMS

SEQ ID NO: 820 - protein, 10 aa, Artificial Sequence
  Synthetic Sequence
GFTFNDYAMS

SEQ ID NO: 821 - protein, 10 aa, Artificial Sequence
  Synthetic Sequence
GFTLDYYAIG

SEQ ID NO: 822 - protein, 9 aa, Artificial Sequence
  Synthetic Sequence
ISSSDGSTY

SEQ ID NO: 823 - protein, 8 aa, Artificial Sequence
  Synthetic Sequence
ITSDGFPT

SEQ ID NO: 824 - protein, 9 aa, Artificial Sequence
  Synthetic Sequence
IRWNGGSTN

SEQ ID NO: 825 - protein, 9 aa, Artificial Sequence
  Synthetic Sequence
ISSSDGSTY

SEQ ID NO: 826 - protein, 8 aa, Artificial Sequence
  Synthetic Sequence
ITSDGTPT

SEQ ID NO: 827 - protein, 9 aa, Artificial Sequence
  Synthetic Sequence
IDSGGGSTS

SEQ ID NO: 828 - protein, 8 aa, Artificial Sequence
  Synthetic Sequence
ITSGGITD

SEQ ID NO: 829 - protein, 8 aa, Artificial Sequence
  Synthetic Sequence
ITSDGTPT

SEQ ID NO: 830 - protein, 9 aa, Artificial Sequence
  Synthetic Sequence
IDSGGGSTS

SEQ ID NO: 831 - protein, 9 aa, Artificial Sequence
  Synthetic Sequence
IRSNGGYTN

SEQ ID NO: 832 - protein, 9 aa, Artificial Sequence
  Synthetic Sequence
ISSSDVGTY

SEQ ID NO: 833 - protein, 9 aa, Artificial Sequence
  Synthetic Sequence
INSSDGSTY

SEQ ID NO: 834 - protein, 9 aa, Artificial Sequence
  Synthetic Sequence
ISGSDSSTY

SEQ ID NO: 835 - protein, 9 aa, Artificial Sequence
  Synthetic Sequence
ISSSDVGTY

SEQ ID NO: 836 - protein, 8 aa, Artificial Sequence
  Synthetic Sequence
ITSDGTPT

SEQ ID NO: 837 - protein, 8 aa, Artificial Sequence
  Synthetic Sequence
ITSDGTPA

SEQ ID NO: 838 - protein, 9 aa, Artificial Sequence
  Synthetic Sequence
IDSGGGSTS

SEQ ID NO: 839 - protein, 9 aa, Artificial Sequence
  Synthetic Sequence
ISSGDGSKY

SEQ ID NO: 840 - protein, 9 aa, Artificial Sequence
  Synthetic Sequence
ISSSDVGTY

SEQ ID NO: 841 - protein, 8 aa, Artificial Sequence
  Synthetic Sequence
IFGGGFTN

SEQ ID NO: 842 - protein, 8 aa, Artificial Sequence
  Synthetic Sequence
ITSGGITD

SEQ ID NO: 843 - protein, 9 aa, Artificial Sequence
  Synthetic Sequence
ISSSDGSTY

SEQ ID NO: 844 - protein, 9 aa, Artificial Sequence
  Synthetic Sequence
IDSGGGSTS

SEQ ID NO: 845 - protein, 8 aa, Artificial Sequence
  Synthetic Sequence
ITSDGTPT

SEQ ID NO: 846 - protein, 9 aa, Artificial Sequence
  Synthetic Sequence
IDSGGGSTS

SEQ ID NO: 847 - protein, 9 aa, Artificial Sequence
  Synthetic Sequence
ISSSDVGTY

SEQ ID NO: 848 - protein, 9 aa, Artificial Sequence
  Synthetic Sequence
ITWSGGSTS

SEQ ID NO: 849 - protein, 9 aa, Artificial Sequence
  Synthetic Sequence
ISSSDGSTY

SEQ ID NO: 850 - protein, 9 aa, Artificial Sequence
  Synthetic Sequence
IDSGGGSTS

SEQ ID NO: 851 - protein, 9 aa, Artificial Sequence
  Synthetic Sequence
IRSNGGYTN

SEQ ID NO: 852 - protein, 9 aa, Artificial Sequence
  Synthetic Sequence
ISSSDGSTY

SEQ ID NO: 853 - protein, 16 aa, Artificial Sequence
  Synthetic Sequence
DGWSSCRHGINEYLYW

SEQ ID NO: 854 - protein, 8 aa, Artificial Sequence
  Synthetic Sequence
SSGVYNYW

SEQ ID NO: 855 - protein, 12 aa, Artificial Sequence
  Synthetic Sequence
QGYYCSGYGCPR

SEQ ID NO: 856 - protein, 17 aa, Artificial Sequence
  Synthetic Sequence
SGWRLCRPTDEYDYSYW

SEQ ID NO: 857 - protein, 8 aa, Artificial Sequence
  Synthetic Sequence
SSGVYNYW

SEQ ID NO: 858 - protein, 14 aa, Artificial Sequence
  Synthetic Sequence
QGYYCSGYGCSDYW

SEQ ID NO: 859 - protein, 7 aa, Artificial Sequence
  Synthetic Sequence
RDRTIWW

SEQ ID NO: 860 - protein, 8 aa, Artificial Sequence
  Synthetic Sequence
SSGVYNYW

SEQ ID NO: 861 - protein, 14 aa, Artificial Sequence
  Synthetic Sequence
QGYYCSGYGCSDYW

SEQ ID NO: 862 - protein, 12 aa, Artificial Sequence
  Synthetic Sequence
QGYYCSGYGCYP

SEQ ID NO: 863 - protein, 15 aa, Artificial Sequence
  Synthetic Sequence
DGYYYCSDYPHPLYW

SEQ ID NO: 864 - protein, 15 aa, Artificial Sequence
  Synthetic Sequence
DGWRDCTWSNEYAYW

SEQ ID NO: 865 - protein, 15 aa, Artificial Sequence
  Synthetic Sequence
TGWRTCRGLNEYDYW

SEQ ID NO: 866 - protein, 15 aa, Artificial Sequence
  Synthetic Sequence
DGYYYCSDYPHPLYW

SEQ ID NO: 867 - protein, 8 aa, Artificial Sequence
  Synthetic Sequence
SSGVYNYW

SEQ ID NO: 868 - protein, 8 aa, Artificial Sequence
  Synthetic Sequence
SSGVYNYW

SEQ ID NO: 869 - protein, 14 aa, Artificial Sequence
  Synthetic Sequence
QGYYCSGYGCSDYW

SEQ ID NO: 870 - protein, 15 aa, Artificial Sequence
  Synthetic Sequence
DGYYYCSDYPHPLYW

SEQ ID NO: 871 - protein, 15 aa, Artificial Sequence
  Synthetic Sequence
DGYYYCSDYPHPLYW

SEQ ID NO: 872 - protein, 13 aa, Artificial Sequence
  Synthetic Sequence
DLVSGSSRLYDYW

SEQ ID NO: 873 - protein, 7 aa, Artificial Sequence
  Synthetic Sequence
RDRTIWW

SEQ ID NO: 874 - protein, 16 aa, Artificial Sequence
  Synthetic Sequence
DGWSSCRHGINEYLYW

SEQ ID NO: 875 - protein, 14 aa, Artificial Sequence
  Synthetic Sequence
QGYYCSGYGCSDYW

SEQ ID NO: 876 - protein, 8 aa, Artificial Sequence
  Synthetic Sequence
SSGVYNYW

SEQ ID NO: 877 - protein, 14 aa, Artificial Sequence
  Synthetic Sequence
QGYYCSGYGCSDYW

SEQ ID NO: 878 - protein, 15 aa, Artificial Sequence
  Synthetic Sequence
DGYYYCSDYPHPLYW

SEQ ID NO: 879 - protein, 18 aa, Artificial Sequence
  Synthetic Sequence
MGRTNYGVIYDPNMYNYW

SEQ ID NO: 880 - protein, 17 aa, Artificial Sequence
  Synthetic Sequence
SGWRLCRPTDEYDYLYW

SEQ ID NO: 881 - protein, 14 aa, Artificial Sequence
  Synthetic Sequence
QGYYCSGYGCSDYW

SEQ ID NO: 882 - protein, 12 aa, Artificial Sequence
  Synthetic Sequence
QGYYCSGYGCYP

SEQ ID NO: 883 - protein, 16 aa, Artificial Sequence
  Synthetic Sequence
DGWSSCRHGINEYLYW

SEQ ID NO: 884 - protein, 143 aa, Artificial Sequence
  Synthetic Sequence
QVQLQESGGGLVQAGGSLRLSCAASGFTLDYYAIGWFRQAPGKEREEVSCISSSDGSTYYADSVKGRFTISRDNAKNTVNLQMNSLKPEDTAVYYCATDGWSSCRHGINEYLYWGQGTQVTVSSAAAYPYDVPDYGSHHHHHH

SEQ ID NO: 885 - protein, 134 aa, Artificial Sequence
  Synthetic Sequence
QVQLQESGGGLVQAGGSLRLSCTASGTIFSINHMDWFRQAPGKQRELVALITSDGFPTYADSAKGRFTISRDNTKKTVSLQMNSLKPEDTAVYYCHVSSGVYNYWGQGTQVTVSSAAAYPYDVPDYGSHHHHHH

SEQ ID NO: 886 - protein, 138 aa, Artificial Sequence
  Synthetic Sequence
QVQLQESGGGLVQPGGSLRLSCAASGFTFDDYGMSWVRQAPGKGLEWVSAIRWNGGSTNYADSVKGRFTISRDNAKNTLYLQMNSLKSEDTAVYYCAQGYYCSGYGCPRGQGTQVTVSSAAAYPYDVPDYGSHHHHHH

SEQ ID NO: 887 - protein, 144 aa, Artificial Sequence
  Synthetic Sequence
QVQLQESGGGLVQPGGSLRLSCAASGFTLDYYAINWFRQAPGKEREEVSCISSSDGSTYYADSVKGRFTISRDNAKNTVYLQMNSLKPEDTAVYYCATSGWRLCRPTDEYDYSYWGQGTQVTVSSAAAYPYDVPDYGSHHHHHH

SEQ ID NO: 888 - protein, 134 aa, Artificial Sequence
  Synthetic Sequence
QVQLQESGGGVVQAGGSLRLSCTASGTIFSINRMDWFRQAPGKQRELVALITSDGTPTYADSAKGRFTISRDNTKKTVSLQMNSLKPEDTAVYYCHVSSGVYNYWGQGTQVTVSSAAAYPYDVPDYGSHHHHHH

SEQ ID NO: 889 - protein, 140 aa, Artificial Sequence
  Synthetic Sequence
QVQLQESGGGLVQTGGSLRLSCAASGFTFSSYGMSWVRQTPGKGPEWVSAIDSGGGSTSYADSVKGRFTISRDNAKNTLYLQMNSLKPEDTAVYYCAQGYYCSGYGCSDYWGQGTQVTVSSAAAYPYDVPDYGSHHHHHH

SEQ ID NO: 890 - protein, 133 aa, Artificial Sequence
  Synthetic Sequence
QVQLQESGGGLVQPGGSLRLSCAASGKIFSGNDMGWYRQAPGKQRELVGIITSGGITDYADAVKGRFTISRDNAKNMMYLQMNSLKPEDTAVYYCNMRDRTIWWGQGTQVTVSSAAAYPYDVPDYGSHHHHHH

SEQ ID NO: 891 - protein, 134 aa, Artificial Sequence
  Synthetic Sequence
QVQLQESGGGSVQAGGSLRLSCTASGTIFSINRMDWFRQAPGKQRELVALITSDGTPTYADSAKGRFTISRDNTKKTVSLQMNSLKPEDTAVYYCHVSSGVYNYWGQGTQVTVSSAAAYPYDVPDYGSHHHHHH

SEQ ID NO: 892 - protein, 140 aa, Artificial Sequence
  Synthetic Sequence
QVQLQESGGGLVQPGGSLRLSCAASGFTFSSYGMSWVRQTPGKGPEWVSAIDSGGGSTSYADSVKGRFTTSRDNAKNTLYLQMNSLKPEDTAVYYCAQGYYCSGYGCSDYWGQGTQVTVSSAAAYPYDVPDYGSHHHHHH

SEQ ID NO: 893 - protein, 138 aa, Artificial Sequence
  Synthetic Sequence
QVQLQESGGGLVQPGGSLRLSCAASGFTFNDYAMSWVRQAPGKGLEWVSGIRSNGGYTNYADSVKGRFTISRDNAKNTLYLQMNSLKSEDTAVYYCAQGYYCSGYGCYPGQGTQVTVSSAAAYPYDVPDYGSHHHHHH

SEQ ID NO: 894 - protein, 142 aa, Artificial Sequence
  Synthetic Sequence
QVQLQESGGGLVQAGGSLRLSCAASGFNLDPYAIAWFRQAPGKEREEVSCISSSDVGTYYADSVKGRFTISRDNAKKTVYLQMNSLKPEDTAVYYCATDGYYYCSDYPHPLYWGQGTQVTVSSAAAYPYDVPDYGSHHHHHH

SEQ ID NO: 895 - protein, 142 aa, Artificial Sequence
  Synthetic Sequence
QVQLQESGGGLVQPGGSLRLSCAASGFTFTAYAMSWFRQAPGKEREEVSCINSSDGSTYYADSVKGRFTISRDNAKNTVYLQMNSLKPEDTAVYHCATDGWRDCTWSNEYAYWGQGTQVTVSSAAAYPYDVPDYGSHHHHHH

SEQ ID NO: 896 - protein, 142 aa, Artificial Sequence
  Synthetic Sequence
QVQLQESGGGLVQPGGSLRLSCAASGFTFDYYAIGWFRQAPGKEREEVSCISGSDSSTYYADSVKGRFTIVRDNAQNTVYLQMNSLKPEDTAIYYCAVTGWRTCRGLNEYDYWGQGTQVTVSSAAAYPYDVPDYGSHHHHHH

SEQ ID NO: 897 - protein, 142 aa, Artificial Sequence
  Synthetic Sequence
QVQLQESGGGLVQPGGSLRLSCAASGFNLDPYAIAWFRQAPGKEREEVSCISSSDVGTYYADSVKGRFTISRDNTKKTVYLQMNSLKPEDTAVYYCATDGYYYCSDYPHPLYWGQGTQVTVSSAAAYPYDVPDYGSHHHHHH

SEQ ID NO: 898 - protein, 134 aa, Artificial Sequence
  Synthetic Sequence
QVQLQESGGGLVQAGESLRLSCTASGTIFSINRMDWFRQAPGKQRELVALITSDGTPTYADSAKGRFTISRDNTKKTVSLQMNSLKPEDTAVYYCHVSSGVYNYWGQGTQVTVSSAAAYPYDVPDYGSHHHHHH

SEQ ID NO: 899 - protein, 134 aa, Artificial Sequence
  Synthetic Sequence
QVQLQESGGGLVQAGGSLRLSCTASGTIFSINRMDWFRQAPGKQRELVALITSDGTPAYADSAKGRFTISRDNTKKTVSLQMNSLKPEDTAVYYCHVSSGVYNYWGQGTQVTVSSAAAYPYDVPDYGSHHHHHH

SEQ ID NO: 900 - protein, 140 aa, Artificial Sequence
  Synthetic Sequence
QVQLQESGGGLVQSGGSLRLSCKTSGFTFSSYGMSWVRQTPGKGPEWVSAIDSGGGSTSYADSVKGRFTISRDNAKNTLYLQMNSLKPEDTAVYYCAQGYYCSGYGCSDYWGQGTQVTVSSAAAYPYDVPDYGSHHHHHH

SEQ ID NO: 901 - protein, 142 aa, Artificial Sequence
  Synthetic Sequence
QVQLQESGGGLVQPGGSLRLSCAASGFNLDPYAIGWFRQAPGKEREEVSCISSGDGSKYYADSVKGRFTMSRDNAKKTVYLQMNSLKPEDTAVYYCATDGYYYCSDYPHPLYWGQGTQVTVSSAAAYPYDVPDYGSHHHHHH

SEQ ID NO: 902 - protein, 142 aa, Artificial Sequence
  Synthetic Sequence
QVQLQESGGGLVQPGGSLRLSCAVSGFNLDPYAIAWFRQAPGKEREEVSCISSSDVGTYYADSVKGRFTISRDNAKKTVYLQMNSLKPEDTAVYYCATDGYYYCSDYPHPLYWGQGTQVTVSSAAAYPYDVPDYGSHHHHHH

SEQ ID NO: 903 - protein, 139 aa, Artificial Sequence
  Synthetic Sequence
QVQLQESGGGLVQAGGSLRLSCAASESIFSIEAMGWYRQAPGKQRELVAAIFGGGFTNYADSVKGRFTISRDNANRTVYLQMNSLKPEDTAVYYCNADLVSGSSRLYDYWGQGTQVTVSSAAAYPYDVPDYGSHHHHHH

SEQ ID NO: 904 - protein, 133 aa, Artificial Sequence
  Synthetic Sequence
QVQLQESGGGLVQAGGSLRLSCAASGKIFSGNDMGWYRQAPGKQRELVGIITSGGITDYADAVKGRFTISRDNAKNMMYLQMNSLKPEDTAVYYCNMRDRTIWWGQGTQVTVSSAAAYPYDVPDYGSHHHHHH

SEQ ID NO: 905 - protein, 143 aa, Artificial Sequence
  Synthetic Sequence
QVQLQESGGGLVQPGGSLRLSCAASGFTLDYYAIGWFRQAPGKEREEVSCISSSDGSTYYADSVKGRFTISRDNAKNTVNLQMNSLKPEDTAVYYCATDGWSSCRHGINEYLYWGQGTQVTVSSAAAYPYDVPDYGSHHHHHH

SEQ ID NO: 906 - protein, 140 aa, Artificial Sequence
  Synthetic Sequence
QVQLQESGGGLVQAGGSLRLSCAASGFTFSSYGMSWVRQTPGKGPEWVSAIDSGGGSTSYADSVKGRFTISRDNAKNTLYLQMNSLKPEDTAVYYCAQGYYCSGYGCSDYWGQGTQVTVSSAAAYPYDVPDYGSHHHHHH

SEQ ID NO: 907 - protein, 134 aa, Artificial Sequence
  Synthetic Sequence
QVQLQESGGGLVQPGGSLRLSCTASGTIFSINRMDWFRQAPGKQRELVALITSDGTPTYADSAKGRFTISRDNTKKTVSLQMNSLKPEDTAVYYCHVSSGVYNYWGQGTQVTVSSAAAYPYDVPDYGSHHHHHH

SEQ ID NO: 908 - protein, 140 aa, Artificial Sequence
  Synthetic Sequence
QVQLQESGGGLVQPGGSLRLSCAASGFTFSSYGMSWVRQTPGKGPEWVSAIDSGGGSTSYADSVKGRFTISRDNAKNTLYLQMNSLKPEDTAVYYCAQGYYCSGYGCSDYWGQGTQVTVSSAAAYPYDVPDYGSHHHHHH

SEQ ID NO: 909 - protein, 142 aa, Artificial Sequence
  Synthetic Sequence
QVQLQESGGGLVQPGGSLRLSCAASGFNLDPYAIAWFRQAPGKEREEVSCISSSDVGTYYADSVKGRFTISRDNAKKTVYLQMNSLKPEDTAVYYCATDGYYYCSDYPHPLYWGQGTQVTVSSAAAYPYDVPDYGSHHHHHH

SEQ ID NO: 910 - protein, 145 aa, Artificial Sequence
  Synthetic Sequence
  misc_feature (13)..(13): Xaa can be any naturally occurring amino acid
QVQLQESGGGLVXAGGSLRLSCAASGRTFSISAMGWFRQAPGKEREFVAAITWSGGSTSYTDSVKGRFTISRDNAKNTLYLQMNSLKPEDTAIYYCAAMGRTNYGVIYDPNMYNYWGQGTQVTVSSAAAYPYDVPDYGSHHHHHH

SEQ ID NO: 911 - protein, 144 aa, Artificial Sequence
  Synthetic Sequence
QVQLQESGGGLVQPGGSLRLSCAASGFTLDYYAINWFRQAPGKEREEVSCISSSDGSTYYADSVKGRFTISRDNAKNTVYLQMNSLKPEDTAVYYCATSGWRLCRPTDEYDYLYWGQGTQVTVSSAAAYPYDVPDYGSHHHHHH

SEQ ID NO: 912 - protein, 140 aa, Artificial Sequence
  Synthetic Sequence
QVQLQESGGGLVQAGGSMRLSCAASGFTFSSYGMSWVRQTPGKGPEWVSAIDSGGGSTSYADSVKGRFTISRDNAKNTLYLQMNSLKPEDTAVYYCAQGYYCSGYGCSDYWGQGTQVTVSSAAAYPYDVPDYGSHHHHHH

SEQ ID NO: 913 - protein, 138 aa, Artificial Sequence
  Synthetic Sequence
QVQLQESGGGTVQAGGSLRLSCAASGFTFNDYAMSWVRQAPGKGLEWVSGIRSNGGYTNYADSVKGRFTISRDNAKNTLYLQMNSLKSEDTAVYYCAQGYYCSGYGCYPGQGTQVTVSSAAAYPYDVPDYGSHHHHHH

SEQ ID NO: 914 - protein, 143 aa, Artificial Sequence
  Synthetic Sequence
QVQLQESGGGLVQPGTSLRLSCAASGFTLDYYAIGWFRQAPGKEREEVSCISSSDGSTYYADSVKGRFTISRDNAKNTVNLQMNSLKPEDTAVYYCATDGWSSCRHGINEYLYWGQGTQVTVSSAAAYPYDVPDYGSHHHHHH

SEQ ID NO: 915 - protein, 451 aa, Artificial Sequence
  Synthetic Sequence
EVQLVESGGGLVQPGGSLRLSCAASGFTFSRYWMSWVRQAPGKGLEWVANIKQDGSEKYYVDSVKGRFTISRDNAKNSLYLQMNSLRAEDTAVYYCAREGGWFGELAFDYWGQGTLVTVSSASTKGPSVFPLAPSSKSTSGGTAALGCLVKDYFPEPVTVSWNSGALTSGVHTFPAVLQSSGLYSLSSVVTVPSSSLGTQTYICNVNHKPSNTKVDKRVEPKSCDKTHTCPPCPAPEFEGGPSVFLFPPKPKDTLMISRTPEVTCVVVDVSHEDPEVKFNWYVDGVEVHNAKTKPREEQYNSTYRVVSVLTVLHQDWLNGKEYKCKVSNKALPASIEKTISKAKGQPREPQVYTLPPSREEMTKNQVSLTCLVKGFYPSDIAVEWESNGQPENNYKTTPPVLDSDGSFFLYSKLTVDKSRWQQGNVFSCSVMHEALHNHYTQKSLSLSPGK

SEQ ID NO: 916 - protein, 215 aa, Artificial Sequence
  Synthetic Sequence
EIVLTQSPGTLSLSPGERATLSCRASQRVSSSYLAWYQQKPGQAPRLLIYDASSRATGIPDRFSGSGSGTDFTLTISRLEPEDFAVYYCQQYGSLPWTFGQGTKVEIKRTVAAPSVFIFPPSDEQLKSGTASVVCLLNNFYPREAKVQWKVDNALQSGNSQESVTEQDSKDSTYSLSSTLTLSKADYEKHKVYACEVTHQGLSSPVTKSFNRGEC

SEQ ID NO: 917 - protein, 121 aa, Artificial Sequence
  Synthetic Sequence
EVQLVESGGGLVQPGGSLRLSCAASGFTFSRYWMSWVRQAPGKGLEWVANIKQDGSEKYYVDSVKGRFTISRDNAKNSLYLQMNSLRAEDTAVYYCAREGGWFGELAFDYWGQGTLVTVSS

SEQ ID NO: 918 - protein, 108 aa, Artificial Sequence
  Synthetic Sequence
EIVLTQSPGTLSLSPGERATLSCRASQRVSSSYLAWYQQKPGQAPRLLIYDASSRATGIPDRFSGSGSGTDFTLTISRLEPEDFAVYYCQQYGSLPWTFGQGTKVEIK

SEQ ID NO: 919 - protein, 448 aa, Artificial Sequence
  Synthetic Sequence
EVQLVESGGGLVQPGGSLRLSCAASGFTFSDSWIHWVRQAPGKGLEWVAWISPYGGSTYYADSVKGRFTISADTSKNTAYLQMNSLRAEDTAVYYCARRHWPGGFDYWGQGTLVTVSSASTKGPSVFPLAPSSKSTSGGTAALGCLVKDYFPEPVTVSWNSGALTSGVHTFPAVLQSSGLYSLSSVVTVPSSSLGTQTYICNVNHKPSNTKVDKKVEPKSCDKTHTCPPCPAPELLGGPSVFLFPPKPKDTLMISRTPEVTCVVVDVSHEDPEVKFNWYVDGVEVHNAKTKPREEQYASTYRVVSVLTVLHQDWLNGKEYKCKVSNKALPAPIEKTISKAKGQPREPQVYTLPPSREEMTKNQVSLTCLVKGFYPSDIAVEWESNGQPENNYKTTPPVLDSDGSFFLYSKLTVDKSRWQQGNVFSCSVMHEALHNHYTQKSLSLSPGK

SEQ ID NO: 920 - protein, 214 aa, Artificial Sequence
  Synthetic Sequence
DIQMTQSPSSLSASVGDRVTITCRASQDVSTAVAWYQQKPGKAPKLLIYSASFLYSGVPSRFSGSGSGTDFTLTISSLQPEDFATYYCQQYLYHPATFGQGTKVEIKRTVAAPSVFIFPPSDEQLKSGTASVVCLLNNFYPREAKVQWKVDNALQSGNSQESVTEQDSKDSTYSLSSTLTLSKADYEKHKVYACEVTHQGLSSPVTKSFNRGEC

SEQ ID NO: 921 - protein, 450 aa, Artificial Sequence
  Synthetic Sequence
EVQLLESGGGLVQPGGSLRLSCAASGFTFSSYIMMWVRQAPGKGLEWVSSIYPSGGITFYADTVKGRFTISRDNSKNTLYLQMNSLRAEDTAVYYCARIKLGTVTTVDYWGQGTLVTVSSASTKGPSVFPLAPSSKSTSGGTAALGCLVKDYFPEPVTVSWNSGALTSGVHTFPAVLQSSGLYSLSSVVTVPSSSLGTQTYICNVNHKPSNTKVDKKVEPKSCDKTHTCPPCPAPELLGGPSVFLFPPKPKDTLMISRTPEVTCVVVDVSHEDPEVKFNWYVDGVEVHNAKTKPREEQYNSTYRVVSVLTVLHQDWLNGKEYKCKVSNKALPAPIEKTISKAKGQPREPQVYTLPPSRDELTKNQVSLTCLVKGFYPSDIAVEWESNGQPENNYKTTPPVLDSDGSFFLYSKLTVDKSRWQQGNVFSCSVMHEALHNHYTQKSLSLSPGK

SEQ ID NO: 922 - protein, 216 aa, Artificial Sequence
  Synthetic Sequence
QSALTQPASVSGSPGQSITISCTGTSSDVGGYNYVSWYQQHPGKAPKLMIYDVSNRPSGVSNRFSGSKSGNTASLTISGLQAEDEADYYCSSYTSSSTRVFGTGTKVTVLGQPKANPTVTLFPPSSEELQANKATLVCLISDFYPGAVTVAWKADGSPVKAGVETTKPSKQSNNKYAASSYLSLTPEQWKSHRSYSCQVTHEGSTVEKTVAPTECS

SEQ ID NO: 923 - protein, 123 aa, Artificial Sequence
  Synthetic Sequence
QVQLVQSGAEVKKPGSSVKVSCKTSGDTFSTYAISWVRQAPGQGLEWMGGIIPIFGKAHYAQKFQGRVTITADESTSTAYMELSSLRSEDTAVYFCARKFHFVSGSPFGMDVWGQGTTVTVSS

SEQ ID NO: 924 - protein, 106 aa, Artificial Sequence
  Synthetic Sequence
EIVLTQSPATLSLSPGERATLSCRASQSVSSYLAWYQQKPGQAPRLLIYDASNRATGIPARFSGSGSGTDFTLTISSLEPEDFAVYYCQQRSNWPTFGQGTKVEIK

SEQ ID NO: 925 - protein, 117 aa, Artificial Sequence
  Synthetic Sequence
QVQLVQSGAEVKKPGASVKVSCKASGYTFTDYGFSWVRQAPGQGLEWMGWITAYNGNTNYAQKLQGRVTMTTDTSTSTVYMELRSLRSDDTAVYYCARDYFYGMDVWGQGTTVTVSS

SEQ ID NO: 926 - protein, 107 aa, Artificial Sequence
  Synthetic Sequence
EIVLTQSPATLSLSPGERATLSCRASQSVSSYLVWYQQKPGQAPRLLIYDASNRATGIPARFSGSGSGTDFTLTISSLEPEDFAVYYCQQRSNWPRTFGQGTKVEIK

SEQ ID NO: 927 - protein, 118 aa, Artificial Sequence
  Synthetic Sequence
QVQLVQSGAEVKKPGASVKVSCKASGYTFTSYDVHWVRQAPGQRLEWMGWLHADTGITKFSQKFQGRVTITRDTSASTAYMELSSLRSEDTAVYYCARERIQLWFDYWGQGTLVTVSS

SEQ ID NO: 928 - protein, 107 aa, Artificial Sequence
  Synthetic Sequence
DIQMTQSPSSLSASVGDRVTITCRASQGISSWLAWYQQKPEKAPKSLIYAASSLQSGVPSRFSGSGSGTDFTLTISSLQPEDFATYYCQQYNSYPYTFGQGTKLEIK

SEQ ID NO: 929 - protein, 120 aa, Artificial Sequence
  Synthetic Sequence
QVQLVQSGAEVKKPGSSVKVSCKVSGGIFSTYAINWVRQAPGQGLEWMGGIIPIFGTANHAQKFQGRVTITADESTSTAYMELSSLRSEDTAVYYCARDQGIAAALFDYWGQGTLVTVSS

SEQ ID NO: 930 - protein, 108 aa, Artificial Sequence
  Synthetic Sequence
EIVLTQSPGTLSLSPGERATLSCRASQSVSSSYLAWYQQKPGQAPRLLIYGASSRATGIPDRFSGSGSGTDFTLTISRLEPEDFAVYYCQQYGSSPWTFGQGTKVEIK

SEQ ID NO: 931 - protein, 113 aa, Artificial Sequence
  Synthetic Sequence
EVQLVESGGGLVQPGRSLRLSCAVSGFTFDDYVVHWVRQAPGKGLEWVSGISGNSGNIGYADSVKGRFTISRDNAKNSLYLQMNSLRAEDTALYYCAVPFDYWGQGTLVTVSS

SEQ ID NO: 932 - protein, 107 aa, Artificial Sequence; identical to SEQ ID NO: 928
  Synthetic Sequence

SEQ ID NO: 933 - protein, 123 aa, Artificial Sequence
  Synthetic Sequence
QVQLVQSGAEVKKPGSSVKVSCKTSGDTFSSYAISWVRQAPGQGLEWMGGIIPIFGRAHYAQKFQGRVTITADESTSTAYMELSSLRSEDTAVYFCARKFHFVSGSPFGMDVWGQGTTVTVSS

SEQ ID NO: 934 - protein, 106 aa, Artificial Sequence; identical to SEQ ID NO: 924
  Synthetic Sequence

SEQ ID NO: 935 - protein, 123 aa, Artificial Sequence
  Synthetic Sequence
QVQLVQSGAEVKKPGSSVKVSCKTSGGTFSSYAISWVRQAPGQGLEWMGGIIPIFGKAHYAQKFQGRVTITADESTTTAYMELSSLRSEDTAVYYCARKYDYVSGSPFGMDVWGQGTTVTVSS

SEQ ID NO: 936 - protein, 106 aa, Artificial Sequence; identical to SEQ ID NO: 924
  Synthetic Sequence

SEQ ID NO: 937 - protein, 121 aa, Artificial Sequence
  Synthetic Sequence
QVQLVQSGAEVKKPGSSVKVSCKASGGTFSSYAINWVRQAPGQGLEWMGGIIPIFGSANYAQKFQDRVTITADESTSAAYMELSSLRSEDTAVYYCARDSSGWSRYYMDVWGQGTTVTVSS

SEQ ID NO: 938 - protein, 106 aa, Artificial Sequence
  Synthetic Sequence
EIVLTQSPGTLSLSPGERATLSCRASQSVSSSYLAWYQQKPGQAPRLLIYGASSRATGIPDRFSGSGSGTDFTLTISRLEPEDFAVYYCQQYGSSPFGGGTKVEIK

SEQ ID NO: 939 - protein, 123 aa, Artificial Sequence
  Synthetic Sequence
QVQLVQSGAEVKEPGSSVKVSCKASGGTFNSYAISWVRQAPGQGLEWMGGIIPLFGIAHYAQKFQGRVTITADESTNTAYMDLSSLRSEDTAVYYCARKYSYVSGSPFGMDVWGQGTTVTVSS

SEQ ID NO: 940 - protein, 106 aa, Artificial Sequence
  Synthetic Sequence
EIVLTQSPATLSLSPGERATLSCRASQSVSSYLAWYQQKPGQAPRLLIYDASNRATGIPARFSGSGSGTDFTLTISSLEPEDFAVYYCQQRSNWPTFGQGTRLEIK

SEQ ID NO: 941 - protein, 121 aa, Artificial Sequence
  Synthetic Sequence
EVQLVESGGGLVQPGRSLRLSCAASGITFDDYGMHWVRQAPGKGLEWVSGISWNRGRIEYADSVKGRFTISRDNAKNSLYLQMNSLRAEDTALYYCAKGRFRYFDWFLDYWGQGTLVTVSS

SEQ ID NO: 942 - protein, 107 aa, Artificial Sequence
  Synthetic Sequence
AIQLTQSPSSLSASVGDRVTITCRASQGISSALAWYQQKPGKAPKLLIYDASSLESGVPSRFSGSGSGTDFTLTISSLQPEDFATYYCQQFNSYPFTFGPGTKVDIK

SEQ ID NO: 943 - protein, 118 aa, Artificial Sequence
  Synthetic Sequence
EVKLQESGPSLVKPSQTLSLTCSVTGYSITSDYWNWIRKFPGNKLEYVGYISYTGSTYYNPSLKSRISITRDTSKNQYYLQLNSVTSEDTATYYCARYGGWLSPFDYWGQGTTLTVSS

SEQ ID NO: 944 - protein, 107 aa, Artificial Sequence
  Synthetic Sequence
DIVMTQSHKLMSTSVGDRVSITCKASQDVGTAVAWYQQKPGQSPKLLIYWASTRHTGVPDRFTGSGSGTDFTLTISNVQSEDLADYFCQQDSSYPLTFGAGTKVELK

SEQ ID NO: 945 - protein, 120 aa, Artificial Sequence
  Synthetic Sequence
EVQLQESGPGLVAPSQSLSITCTVSGFSLTTYSINWIRQPPGKGLEWLGVMWAGGGTNSNSVLKSRLIISKDNSKSQVFLKMNSLQTDDTARYYCARYYGNSPYYAIDYWGQGTSVTVSS

SEQ ID NO: 946 - protein, 107 aa, Artificial Sequence
  Synthetic Sequence
DIVTTQSHKLMSTSVGDRVSITCKASQDVGTAVAWYQQKPGQSPKLLIYWASTRHTGVPDRFTGSGSGTDFTLTISNVQSEDLADYFCQQDSSYPLTFGAGTKVELK

SEQ ID NO: 947 - protein, 118 aa, Artificial Sequence
  Synthetic Sequence
EVKLQESGPSLVKPSQTLSLTCSVTGYSIISDYWNWIRKFPGNKLEYLGYISYTGSTYYNPSLKSRISITRDTSKNQYYLQLNSVTTEDTATYYCARRGGWLLPFDYWGQGTTLTVSS

SEQ ID NO: 948 - protein, 113 aa, Artificial Sequence
  Synthetic Sequence
DIVMTQSPSSLAVSVGEKVSMGCKSSQSLLYSSNQKNSLAWYQQKPGQSPKLLIDWASTRESGVPDRFTGSGSGTDFTLTISSVKAEDLAVYYCQQYYGYPLTFGAGTKLELK

SEQ ID NO: 949 - protein, 118 aa, Artificial Sequence
  Synthetic Sequence
EVKLQESGPSLVKPGASVKLSCKASGYTFTSYDINWVKQRPGQGLEWIGWIFPRDNNTKYNENFKGKATLTVDTSSTTAYMELHSLTSEDSAVYFCTKENWVGDFDYWGQGTTLTLSS

SEQ ID NO: 950 - protein, 106 aa, Artificial Sequence
  Synthetic Sequence
DIVMTQSPAIMSASPGEKVTMTCSASSSIRYMHWYQQKPGTSPKRWISDTSKLTSGVPARFSGSGSGTSYALTISSMEAEDAATYYCHQRSSYPWTFGGGTKLEIK

SEQ ID NO: 951 - protein, 114 aa, Artificial Sequence
  Synthetic Sequence
EVQLQQSGPDLVTPGASVRISCQASGYTFPDYYMNWVKQSHGKSLEWIGDIDPNYGGTTYNQKFKGKAILTVDRSSSTAYMELRSLTSEDSAVYYCARGALTDWGQGTSLTVSS

SEQ ID NO: 952 - protein, 106 aa, Artificial Sequence
  Synthetic Sequence
QIVLSQSPAILSASPGEKVTMTCRASSSVSYIYWFQQKPGSSPKPWIYATFNLASGVPARFSGSGSGTSYSLTISRVETEDAATYYCQQWSNNPLTFGAGTKLELK

SEQ ID NO: 953 - protein, 115 aa, Artificial Sequence
  Synthetic Sequence
EVQLVQSGPELKKPGASVKMSCKASGYTFTSYVMHWVKQAPGQRLEWIGYVNPFNDGTKYNEMFKGRATLTSDKSTSTAYMELSSLRSEDSAVYYCARQAWGYPWGQGTLVTVSS

SEQ ID NO: 954 - protein, 115 aa, Artificial Sequence
  Synthetic Sequence
EVQLVQSGAEVKKPGASVKMSCKASGYTFTSYVMHWVKQAPGQRLEWIGYVNPFNDGTKYNEMFKGRATLTSDKSTSTAYMELSSLRSEDTAVYYCARQAWGYPWGQGTLVTVSS

SEQ ID NO: 955 - protein, 115 aa, Artificial Sequence
  Synthetic Sequence
EVQLVQSGAEVKKPGASVKMSCKASGYTFTSYVMHWVRQAPGQRLEWIGYVNPFNDGTKYNEMFKGRATLTSDKSTSTAYMELSSLRSEDTAVYYCARQAWGYPWGQGTLVTVSS

SEQ ID NO: 956 - protein, 115 aa, Artificial Sequence
  Synthetic Sequence
EVQLVQSGAEVKKPGASVKVSCKASGYTFTSYVMHWVRQAPGQRLEWIGYVNPFNDGTKYNEMFKGRATLTSDKSTSTAYMELSSLRSEDTAVYYCARQAWGYPWGQGTLVTVSS

SEQ ID NO: 957 - protein, 115 aa, Artificial Sequence
  Synthetic Sequence
EVQLVQSGAEVKKPGASVKVSCKASGYTFTSYVMHWVRQAPGQRLEWIGYVNPFNDGTKYNEMFKGRATITSDKSTSTAYMELSSLRSEDTAVYYCARQAWGYPWGQGTLVTVSS

SEQ ID NO: 958 - protein, 111 aa, Artificial Sequence
  Synthetic Sequence
DIVLTQSPASLALSPGERATLSCRATESVEYYGTSLVQWYQQKPGQPPKLLIYAASSVDSGVPSRFSGSGSGTDFTLTINSLEEEDAAMYFCQQSRRVPYTFGQGTKLEIK

SEQ ID NO: 959 - protein, 111 aa, Artificial Sequence
  Synthetic Sequence
DIVLTQSPATLSLSPGERATLSCRATESVEYYGTSLVQWYQQKPGQPPKLLIYAASSVDSGVPSRFSGSGSGTDFTLTINSLEAEDAAMYFCQQSRRVPYTFGQGTKLEIK

SEQ ID NO: 960 - protein, 111 aa, Artificial Sequence
  Synthetic Sequence
EIVLTQSPATLSLSPGERATLSCRATESVEYYGTSLVQWYQQKPGQPPKLLIYAASSVDSGVPSRFSGSGSGTDFTLTINSLEAEDAAMYFCQQSRRVPYTFGQGTKLEIK

SEQ ID NO: 961 - protein, 111 aa, Artificial Sequence
  Synthetic Sequence
DIVLTQSPATLSLSPGERATLSCRATESVEYYGTSLVQWYQQKPGQPPKLLIYAASSVDSGVPSRFSGSGSGTDFTLTINSLEAEDAATYFCQQSRRVPYTFGQGTKLEIK

SEQ ID NO: 962 - protein, 120 aa, Artificial Sequence
  Synthetic Sequence
EVQLVESGGGLVKPGGSLRLSCAASGFTFSTYSMNWVRQAPGKGLEWVSSISSSGDYIYYADSVKGRFTISRDNAKNSLFLQMNSLKAEDTAVYYCARDLVTSMVAFDYWGQGTLVTVSS

SEQ ID NO: 963 - protein, 108 aa, Artificial Sequence
  Synthetic Sequence
SYELTQPPSVSVSPGQAARITCSGDALPQKYVFWYQQKSGQAPVLVIYEDSKRPSGIPERFSGSSSGTMATLTISGAQVEDEADYYCYSTDRSGNHRVFGGGTRLTVL

SEQ ID NO: 964 - protein, 120 aa, Artificial Sequence
  Synthetic Sequence
EVQLVESGGGLVQPGGSLRLSCAASGFTFSSYWMSWVRQAPGKGLEWVANIKQDGGEQYYVDSVKGRFTISRDNAKNSLYLQMNSLRAEDTAVYYCARDWNYGYYDMDVWGQGTTVTVSS

SEQ ID NO: 965 - protein, 108 aa, Artificial Sequence
  Synthetic Sequence
EIVLTQSPGTLSLSPGERATLSCRASQSVSSNYLAWFQQKPGQAPRLLIFGTSSRATGIPDRFSGSGSGTDFTLTISRLEPEDFAVYYCQQYGSSIFTFGPGTKVDIK

SEQ ID NO: 966 - protein, 121 aa, Artificial Sequence; identical to SEQ ID NO: 917
  Synthetic Sequence

SEQ ID NO: 967 - protein, 108 aa, Artificial Sequence
  Synthetic Sequence
EIVLTQSPGTLSLSPGERATLSCRASQRVSSSYLAWYQQKPGQAPRLLIYDASSRATGIPDRFSGSGSGTDFTLTISRLEPEDFAVYYCQQYGSLPWTFGQGTEVEIK

SEQ ID NO: 968 - protein, 121 aa, Artificial Sequence
  Synthetic Sequence
EVQLLESGGGLVQPGGSLRLSCAASGFTFSNYAMSWVRQAPGKGLEWVSAIRGSGGSTYYADSVKGRFTISRDNSKNTLYLQMNSLRAEDTAVYYCAKDLHYDSSGYLDYWGQGTLVTVSS

SEQ ID NO: 969 - protein, 107 aa, Artificial Sequence
  Synthetic Sequence
DIQMTQSPSSVSASVGDRVTITCRASQGIRSWLAWYQQKPGKAPKLLIYAISRLQSGVPSRFSGSGSGTDFTLTISSLQPEDFATYYCQQANSFPLTFGGGTKVEIK

SEQ ID NO: 970 - protein, 119 aa, Artificial Sequence
  Synthetic Sequence
EVQLVESGGGLVQPGGSLRLSCAASGFTFSSYWMSWVRQAPGKGLEWVANIKQDGGEKYYVDSVKGRFTISRDNAKNSLFLQMNSLRAEDTAVYYCARVQLYSDYFDYWGQGTLVTVSS

SEQ ID NO: 971 - protein, 107 aa, Artificial Sequence
  Synthetic Sequence
DIQMTQSPSSVSASVGDRVTITCRASQGISSWLAWYQQKSGKAPKLLIYAASGLQSGVPSRFSGSGSGTDFTLTISSLQPEDLATYYCQQSHSLPPTFGQGTKVEIK

SEQ ID NO: 972 - protein, 121 aa, Artificial Sequence
  Synthetic Sequence
EVQLLESGGDLVQPGGSLRLSCAASGFTFNSYAMSWVRQAPGKGLEWVSTISGSGGFTFSADSVKGRFTISRDNSKNTLFLQMNSLRVEDSAVYSCAKVLVGFNNGCWDYWGQGTLVTVSS

SEQ ID NO: 973 - protein, 108 aa, Artificial Sequence
  Synthetic Sequence
SYVLTQPPSVSVAPGQTARITCGGNNIGSKSVHWYQQKPGQAPVLVVYDDSDRPSGIPERFSGSNSGNTATLTISRVEAGDEADYYCQVWDSSNDHVVFGGGTKLTVL

SEQ ID NO: 974 - protein, 120 aa, Artificial Sequence
  Synthetic Sequence
EVQLVESGGGLVKPGGSLRLSCAASGFTFSTYSMNWVRQAPGKGLEWVSSISSSGDYIYYADSVKGRFTISRDNAKNSLYLQMNSLRAEDTAVYYCARDLVTSMVAFDYWGQGTLVTVSS

SEQ ID NO: 975 - protein, 108 aa, Artificial Sequence
  Synthetic Sequence
SYELTQPPSVSVSPGQTARITCSGDALPQKYVFWYQQKSGQAPVLVIYEDSKRPSGIPERFSGSSSGTMATLTISGAQVEDEADYYCYSTDRSGNHRVFGGGTKLTVL

SEQ ID NO: 976 - protein, 121 aa, Artificial Sequence; identical to SEQ ID NO: 917
  Synthetic Sequence

SEQ ID NO: 977 - protein, 108 aa, Artificial Sequence; identical to SEQ ID NO: 918
  Synthetic Sequence

SEQ ID NO: 978 - protein, 120 aa, Artificial Sequence
  Synthetic Sequence
QVQLVQSGAEVKKPGASVKVSCKASGYTFTSYWMYWVRQATGQGLEWMGRIDPNSGSTKYNEKFKNRFTISRDDSKNTAYLQMNSLKTEDTAVYYCARDYRKGLYAMDYWGQGTTVTVSS

SEQ ID NO: 979 - protein, 120 aa, Artificial Sequence
  Synthetic Sequence
EVQLVQSGAEVKKPGATVKISCKVSGYTFTSYWMYWVRQATGQGLEWMGRIDPNSGSTKYNEKFKNRVTITADKSTSTAYMELSSLRSEDTAVYYCARDYRKGLYAMDYWGQGTTVTVSS

SEQ ID NO: 980 - protein, 120 aa, Artificial Sequence
  Synthetic Sequence
EVQLVQSGAEVKKPGESLRISCKGSGYTFTSYWMYWVRQAPGQGLEWMGRIDPNSGSTKYNEKFKNRVTISVDTSKNQFSLKLSSVTAADTAVYYCARDYRKGLYAMDYWGQGTTVTVSS

SEQ ID NO: 981 - protein, 120 aa, Artificial Sequence
  Synthetic Sequence
EVQLVQSGAEVKKPGATVKISCKVSGYTFTSYWMYWIRQSPSRGLEWLGRIDPNSGSTKYNEKFKNRLTISKDTSKNQVVLTMTNMDPVDTATYYCARDYRKGLYAMDYWGQGTTVTVSS

SEQ ID NO: 982 - protein, 120 aa, Artificial Sequence
  Synthetic Sequence
EVQLVQSGAEVKKPGESLRISCKGSGYTFTSYWMYWIRQPPGKGLEWIGRIDPNSGSTKYNEKFKNRVTITADKSTSTAYMELSSLRSEDTAVYYCARDYRKGLYAMDYWGQGTTVTVSS

SEQ ID NO: 983 - protein, 120 aa, Artificial Sequence
  Synthetic Sequence
QVQLVQSGAEVKKPGASVKVSCKASGYTFTSYWMYWIRQSPSRGLEWLGRIDPNSGSTKYNEKFKNRFTISRDDSKNTAYLQMNSLKTEDTAVYYCARDYRKGLYAMDYWGQGTTVTVSS

SEQ ID NO: 984 - protein, 120 aa, Artificial Sequence
  Synthetic Sequence
EVQLVQSGAEVKKPGESLRISCKGSGYTFTSYWMYWVRQARGQRLEWIGRIDPNSGSTKYNEKFKNRLTISKDTSKNQVVLTMTNMDPVDTATYYCARDYRKGLYAMDYWGQGTTVTVSS

SEQ ID NO: 985 - protein, 120 aa, Artificial Sequence
  Synthetic Sequence
QITLKESGPTLVKPTQTLTLTCTFSGYTFTSYWMYWVRQAPGKGLEWVSRIDPNSGSTKYNEKFKNRVTITADKSTSTAYMELSSLRSEDTAVYYCARDYRKGLYAMDYWGQGTTVTVSS

SEQ ID NO: 986 - protein, 120 aa, Artificial Sequence
  Synthetic Sequence
EVQLVQSGAEVKKPGATVKISCKVSGYTFTSYWMYWVRQARGQRLEWIGRIDPNSGSTKYNEKFKNRFTISRDNSKNTLYLQMNSLRAEDTAVYYCARDYRKGLYAMDYWGQGTTVTVSS

SEQ ID NO: 987 - protein, 107 aa, Artificial Sequence
  Synthetic Sequence
DIVMTQTPLSLPVTPGEPASISCKASQDVGTAVAWYLQKPGQSPQLLIYWASTRHTGIPARFSGSGSGTEFTLTISSLQSEDFAVYYCQQYNSYPLTFGQGTKVEIK

SEQ ID NO: 988 - protein, 107 aa, Artificial Sequence
  Synthetic Sequence
DIQMTQSPSSLSASVGDRVTITCKASQDVGTAVAWYLQKPGQSPQLLIYWASTRHTGVPSRFSGSGSGTDFTLTISSLQPEDFATYYCQQYNSYPLTFGQGTKVEIK

SEQ ID NO: 989 - protein, 107 aa, Artificial Sequence
  Synthetic Sequence
EIVLTQSPDFQSVTPKEKVTITCKASQDVGTAVAWYLQKPGQSPQLLIYWASTRHTGVPDRFSGSGSGTDFTLKISRVEAEDVGVYYCQQYNSYPLTFGQGTKVEIK

SEQ ID NO: 990 - protein, 107 aa, Artificial Sequence
  Synthetic Sequence
EIVLTQSPDFQSVTPKEKVTITCKASQDVGTAVAWYLQKPGQSPQLLIYWASTRHTGVPSRFSGSGSGTDFTFTISSLQPEDIATYYCQQYNSYPLTFGQGTKVEIK

SEQ ID NO: 991 - protein, 107 aa, Artificial Sequence
  Synthetic Sequence
EIVLTQSPATLSLSPGERATLSCKASQDVGTAVAWYLQKPGQSPQLLIYWASTRHTGIPPRFSGSGYGTDFTLTINNIESEDAAYYFCQQYNSYPLTFGQGTKVEIK

SEQ ID NO: 992 - protein, 107 aa, Artificial Sequence
  Synthetic Sequence
DVVMTQSPLSLPVTLGQPASISCKASQDVGTAVAWYQQKPGQAPRLLIYWASTRHTGVPSRFSGSGSGTEFTLTISSLQPDDFATYYCQQYNSYPLTFGQGTKVEIK

SEQ ID NO: 993 - protein, 107 aa, Artificial Sequence
  Synthetic Sequence
DIQMTQSPSSLSASVGDRVTITCKASQDVGTAVAWYQQKPGQAPRLLIYWASTRHTGVPSRFSGSGSGTDFTFTISSLQPEDIATYYCQQYNSYPLTFGQGTKVEIK

SEQ ID NO: 994 - protein, 107 aa, Artificial Sequence
  Synthetic Sequence
AIQLTQSPSSLSASVGDRVTITCKASQDVGTAVAWYLQKPGQSPQLLIYWASTRHTGVPSRFSGSGSGTDFTFTISSLEAEDAATYYCQQYNSYPLTFGQGTKVEIK

SEQ ID NO: 995 - protein, 107 aa, Artificial Sequence
  Synthetic Sequence
EIVLTQSPDFQSVTPKEKVTITCKASQDVGTAVAWYQQKPGQAPRLLIYWASTRHTGVPSRFSGSGSGTEFTLTISSLQPDDFATYYCQQYNSYPLTFGQGTKVEIK

SEQ ID NO: 996 - protein, 116 aa, Artificial Sequence
  Synthetic Sequence
EVKLVESGGGLVKPGGSLKLSCAASGFIFRSYGMSWVRQTPEKRLEWVASISSGGSTYYPDSVKGRFTISRDNARNILYLQMSSLRSEDTAMYDCARGYDSGFAYWGQGTLVTVSE

SEQ ID NO: 997 - protein, 116 aa, Artificial Sequence
  Synthetic Sequence
EVKLVESGGGLVKPGGSLKLSCAASGFTFRSYGMSWVRQTPEKRLEWVASISSGGTTYYPDSVKGRFIISRDNARNILYLQMSSLRSEDTAMYYCAKGYDSGFAYWGQGTLVIVSA

SEQ ID NO: 998 - protein, 116 aa, Artificial Sequence
  Synthetic Sequence
QVQLKQSGPGLVQPSQSLSITCTVSGFSLTTYGVHWVRQSPGKGLEWLGVIWRGVTTDYNAAFMSRLTITKDNSKSQVFFKMNSLQANDTAIYYCARLGFYAMDYWGQGTSVTVSS

SEQ ID NO: 999 - protein, 116 aa, Artificial Sequence
  Synthetic Sequence
QVQLKQSGPGLVQPSQSLSITCTVSGFSLTSYGVHWVRQSPGKGLEWLGVIWSGGVTDYNAAFISRLSISKDNSKSQVFFKMNSLQANDTAIYYCARLGFYAMDYWGQGTSVTVSS

SEQ ID NO: 1000 - protein, 119 aa, Artificial Sequence
  Synthetic Sequence
EVKLFESGGGLVQPGGSLKLSCVASGFDFSTYWMHWVRQAPGQGLEWIGQINPDSTTINYAPSLKDRFIISRDNAKNTLFLQMSKVRSEDTALYYCAKPGDYGYDFDCWGQGTTLTVSS

SEQ ID NO: 1001 - protein, 119 aa, Artificial Sequence
  Synthetic Sequence
EVQLQESGPSLVKPSQTLSLTCSVTGDSITSGYWNWIRKFPGNKLEYMGYISYSGSTYYNPSLKSRISITRDTSKNQYYLQLNSVTTEDTATYYCARSLLWFSTGFAYWGQGTLVTVSA

SEQ ID NO: 1002 - protein, 116 aa, Artificial Sequence
  Synthetic Sequence
QVQLKQSGPGLVQPSQSLSITCTVSGFSLTSYGVHWVRQSPGKGLEWLGVIWSGGITDYNAAFKSRLSISKDNSKSQVFFKMNSLQANDTAIYFCARLGFYAMDYWGQGTSVTVSS

SEQ ID NO: 1003 - protein, 116 aa, Artificial Sequence
  Synthetic Sequence
EVKLVESGGGLVKPGGSLKLSCAASGFTFRSYGMSWARQIPEKRLEWVASISSGGTTYYLGSVQGRFTISRDNARNILYLQMSSLRSEDTAMYYCARGYDAGFAYWGQGTLVSVSE

SEQ ID NO: 1004 - protein, 117 aa, Artificial Sequence
  Synthetic Sequence
EVQLQESGPSLVKPSQTLSLTCSVTGDSITSGYWTWIRKFPGNKLEYMGYISYTGSTYYNPSLKSRISISRDTSKSQYYLQLNSVTTEDTATYYCARQRDWLGFAYWGQGTLVTVSA

SEQ ID NO: 1005 - protein, 116 aa, Artificial Sequence
  Synthetic Sequence
EEKLVESGGGLVKPGGSLKLSCAASGFSFSSYGMSWVRQTPEKRLEWVASISSGGSIYYPDSVKGRFTISRDNARNILYLQMSSLRSEDTAMYYCARGYDAGFAFWGQGTLVTASA

SEQ ID NO: 1006 - protein, 116 aa, Artificial Sequence
  Synthetic Sequence
QITLKESGPTLVKPTQTLTLTCTVSGFSLSTYGVHWIRQPPGKALEWLGVIWRGVTTDYNAAFMSRLTITKDNSKNQVVLTMNNMDPVDTATYYCARLGFYAMDYWGQGTLVTVSS

SEQ ID NO: 1007 - protein, 116 aa, Artificial Sequence
  Synthetic Sequence
EVQLVESGGGLVKPGGSLRLSCAASGFIFRSYGMSWVRQAPGKGLEWVASISSGGSTYYPDSVKGRFTISRDNAKNSLYLQMNSLRAEDTAVYDCARGYDSGFAYWGQGTLVTVSS

SEQ ID NO: 1008 - protein, 112 aa, Artificial Sequence
  Synthetic Sequence
DIVLTQSPASLAVSLGQRATISCRASQSVSTSSSSFMHWYQQKPGQPPKLLIKYASNLESGVPARFSGSGSGTDFTLNIHPVEEEDTATYYCQHSWEIPYTFGGGTKLEIKR

SEQ ID NO: 1009 - protein, 111 aa, Artificial Sequence
  Synthetic Sequence
DIVLTQSPPSLAVSLGQRATISCRASQSVSTSSSSYMHWYQQKPGQPPKLLIKYASNLESGVPARFSGSGSGTDFTLNIHPVEEEDTATYYCQHSWEIPYTFGGGTKLEIK

SEQ ID NO: 1010 - protein, 107 aa, Artificial Sequence
  Synthetic Sequence
SIVMTQTPKFLLVSAGDRVTITCKASQSVSNDVAWYQQKPGQSPKLLIYYAANRYTGVPDRFTGSGYGTDFTFTISIVQAEDLAVYFCQQDYTSPYTFGGGTKLEIK

SEQ ID NO: 1011 - protein, 107 aa, Artificial Sequence
  Synthetic Sequence
SIVMTQTPKFLLVSAGDRVTITCKASQSVSNDVGWYQQKPGQSPKLLIYYASNRYSGVPDRFTGSGYGTDFTFTISTVQAEDLAVYFCQQDYTSPYTFGGGTKLEIK

SEQ ID NO: 1012 - protein, 112 aa, Artificial Sequence
  Synthetic Sequence
DVLMTQTPLYLPVSLGDQASISCRSSQIIVHSNANTYLEWFLQKPGQSPKLLIYKVSNRFSGVPDRFSGSGSGTDFTLKISRVEAEDLGVYYCFQGSHVPYTFGGGTKLEIK

SEQ ID NO: 1013 - protein, 108 aa, Artificial Sequence
  Synthetic Sequence
QIVLTQSPAIMSASPGEKVTLTCSASSSVSSSYLYWNQQKPGSSPKVWIYNTSNLASGVPARFSGSGSGTSYSLTISSMEAEDAASYFCHQWRSYPPTLGAGTKLELK

SEQ ID NO: 1014 - protein, 106 aa, Artificial Sequence
  Synthetic Sequence
QIVLTQSPAIMSASPGEKVTMTCSANSSVSYMHWYQQKSGTSPKRWIYDTSKLASGVPARFSGSGSGTSYSLTISSMGAEDAATYYCQQWSSNPWTFGGGTKLEIK

SEQ ID NO: 1015 - protein, 111 aa, Artificial Sequence
  Synthetic Sequence
DIVLTQSPASLAVSLGQRATISCRASQSVSTSSYSYMHWYQQKPGQPPKLLIKYASNLESGVPARFSGSGSGTDFTLNIHPVEEEDTATYYCQNSWEIPYTFGGGTKLEIK

SEQ ID NO: 1016 - protein, 113 aa, Artificial Sequence
  Synthetic Sequence
DIVMTQTPSSLAVSLGEKVTMSCKSSQSLLYSSNQKNSLAWYQQKPGQSPKLLIYWASNRESGVPDRFTGSSSGTDFTLTISSVKAEDLAVYYCQQYYSYPLTFGAGTKLELK

SEQ ID NO: 1017 - protein, 111 aa, Artificial Sequence
  Synthetic Sequence
DIVLTQSPASLAVSLGQRATISCRASQSVSTSSYSYVHWYQQKPGQPPKLLIKYASNLESGVPARFSGSGSGTDFTLNIHPVEEEDTATYYCQHSWEIPYTFGGGTKLEIK

SEQ ID NO: 1018 - protein, 107 aa, Artificial Sequence
  Synthetic Sequence
DIQMTQSPSSLSASVGDRVTITCKASQSVSNDVAWYQQKPGKAPKLLIYYAANRYTGVPDRFSGSGYGTDFTFTISSLQPEDIATYFCQQDYTSPYTFGQGTKLEIK

SEQ ID NO: 1019 - protein, 111 aa, Artificial Sequence
  Synthetic Sequence
DIVLTQSPASLAVSPGQRATITCRASQSVSTSSSSFMHWYQQKPGQPPKLLIKYASNLESGVPARFSGSGSGTDFTLTINPVEANDTANYYCQHSWEIPYTFGQGTKLEIK

SEQ ID NO: 1020 - protein, 117 aa, Artificial Sequence
  Synthetic Sequence
EVQLVQSGAEVKKPGESLRISCKGSGYTFTTYWMHWVRQATGQGLEWMGNIYPGTGGSNFDEKFKNRVTITADKSTSTAYMELSSLRSEDTAVYYCTRWTTGTGAYWGQGTTVTVSS

SEQ ID NO: 1021 - protein, 117 aa, Artificial Sequence
  Synthetic Sequence
EVQLVQSGAEVKKPGESLRISCKGSGYTFTTYWMHWIRQSPSRGLEWLGNIYPGTGGSNFDEKFKNRFTISRDNSKNTLYLQMNSLRAEDTAVYYCTRWTTGTGAYWGQGTTVTVSS

SEQ ID NO: 1022 - protein, 117 aa, Artificial Sequence
  Synthetic Sequence
QVQLVQSGAEVKKPGASVKVSCKASGYTFTTYWMHWIRQSPSRGLEWLGNIYPGTGGSNFDEKFKNRFTISRDNSKNTLYLQMNSLRAEDTAVYYCTRWTTGTGAYWGQGTTVTVSS

SEQ ID NO: 1023 - protein, 117 aa, Artificial Sequence
  Synthetic Sequence
EVQLVQSGAEVKKPGESLRISCKGSGYTFTTYWMHWVRQAPGQGLEWMGNIYPGTGGSNFDEKFKNRFTISRDNSKNTLYLQMNSLRAEDTAVYYCTRWTTGTGAYWGQGTTVTVSS

SEQ ID NO: 1024 - protein, 113 aa, Artificial Sequence
  Synthetic Sequence
EIVLTQSPATLSLSPGERATLSCKSSQSLLDSGNQKNFLTWYQQKPGQAPRLLIYWASTRESGVPSRFSGSGSGTEFTLTISSLQPDDFATYYCQNDYSYPYTFGQGTKVEIK

SEQ ID NO: 1025 - protein, 113 aa, Artificial Sequence
  Synthetic Sequence
DIQMTQSPSSLSASVGDRVTITCKSSQSLLDSGNQKNFLTWYQQKPGQAPRLLIYWASTRESGIPPRFSGSGYGTDFTLTINNIESEDAAYYFCQNDYSYPYTFGQGTKVEIK

SEQ ID NO: 1026 - protein, 113 aa, Artificial Sequence
  Synthetic Sequence
EIVLTQSPATLSLSPGERATLSCKSSQSLLDSGNQKNFLTWYQQKPGKAPKLLIYWASTRESGVPSRFSGSGSGTDFTFTISSLQPEDIATYYCQNDYSYPYTFGQGTKVEIK

SEQ ID NO: 1027 - protein, 113 aa, Artificial Sequence
  Synthetic Sequence
DIVMTQTPLSLPVTPGEPASISCKSSQSLLDSGNQKNFLTWYQQKPGQAPRLLIYWASTRESGVPSRFSGSGSGTDFTFTISSLEAEDAATYYCQNDYSYPYTFGQGTKVEIK

SEQ ID NO: 1028 - protein, 113 aa, Artificial Sequence
  Synthetic Sequence
EIVLTQSPATLSLSPGERATLSCKSSQSLLDSGNQKNFLTWYQQKPGKAPKLLIYWASTRESGVPSRFSGSGSGTDFTFTISSLEAEDAATYYCQNDYSYPYTFGQGTKVEIK

SEQ ID NO: 1029 - protein, 113 aa, Artificial Sequence
  Synthetic Sequence
EIVLTQSPDFQSVTPKEKVTITCKSSQSLLDSGNQKNFLTWYQQKPGQAPRLLIYWASTRESGVPSRFSGSGSGTDFTFTISSLEAEDAATYYCQNDYSYPYTFGQGTKVEIK

SEQ ID NO: 1030 - protein, 113 aa, Artificial Sequence
  Synthetic Sequence
EIVLTQSPATLSLSPGERATLSCKSSQSLLDSGNQKNFLTWYQQKPGQAPRLLIYWASTRESGVPSRFSGSGSGTDFTFTISSLEAEDAATYYCQNDYSYPYTFGQGTKVEIK

SEQ ID NO: 1031 - protein, 113 aa, Artificial Sequence
  Synthetic Sequence
DIQMTQSPSSLSASVGDRVTITCKSSQSLLDSGNQKNFLTWYLQKPGQSPQLLIYWASTRESGVPSRFSGSGSGTDFTFTISSLEAEDAATYYCQNDYSYPYTFGQGTKVEIK

SEQ ID NO: 1032 - protein, 113 aa, Artificial Sequence
  Synthetic Sequence
DVVMTQSPLSLPVTLGQPASISCKSSQSLLDSGNQKNFLTWYQQKPGKAPKLLIYWASTRESGVPSRFSGSGSGTDFTFTISSLEAEDAATYYCQNDYSYPYTFGQGTKVEIK

SEQ ID NO: 1033 - protein, 118 aa, Artificial Sequence
  Synthetic Sequence
EVQLVESGGGLVQPGGSLRLSCAASGFTFSDSWIHWVRQAPGKGLEWVAWISPYGGSTYYADSVKGRFTISADTSKNTAYLQMNSLRAEDTAVYYCARRHWPGGFDYWGQGTLVTVSA

SEQ ID NO: 1034 - protein, 108 aa, Artificial Sequence
  Synthetic Sequence
DIQMTQSPSSLSASVGDRVTITCRASQDVSTAVAWYQQKPGKAPKLLIYSASFLYSGVPSRFSGSGSGTDFTLTISSLQPEDFATYYCQQYLYHPATFGQGTKVEIKR

SEQ ID NO: 1035 - protein, 126 aa, Artificial Sequence
  Synthetic Sequence
EVQLVESGGGLVQPGGSLRLSCAASGFTLDYYAIGWFRQAPGKEREWASSISSSDGSTYYADSVKGRFTISRDNAKNTVFLQMNSLKPEDTAVYSCAASQAPITIATMMKPFYDYWGQGTQVTVSS

SEQ ID NO: 1036 - protein, 123 aa, Artificial Sequence
  Synthetic Sequence
EVQLVESGGGLVQPGGSLRLSCAASGFTLDYYAKCWFRQAPGKEREWVSCISSSDGSTYYADSVKGRFTISRDNAKNTVYLQMNSLKPEDTAVYFCAARHGGPLTVEYFFDYWGQGTQVTVSS

SEQ ID NO: 1037 - protein, 124 aa, Artificial Sequence
  Synthetic Sequence
EVQLVESGGGLVQPGGSLRLSCAASGFTFDYYAIGWFRQAPGKAREGVSCISGGDNSTYYADSVKGRFTISRDNAKNTVYLQMNSLKPEDTAVYYCATGGWKYCSGYDPEYIYWGQGTQVTVSS

SEQ ID NO: 1038 - protein, 115 aa, Artificial Sequence
  Synthetic Sequence
EVQLVESGGGLVQAGGSLRLSCAASGSTFSQYDVGWYRQAPGKQRELVAFSSSGGRTIYPDSVKGRFTFSRDNTKNTVYLQMTSLKPEDTAVYYCKIDWYLNSYWGQGTQVTVSS

SEQ ID NO: 1039 - protein, 114 aa, Artificial Sequence
  Synthetic Sequence
EVQLVESGGGLVQAGGSLRLSCAASGVDASNSAMGWYRQAPGKQREWVARITGGGLIAYTDSVKGRFTISRDNAKSTVYLQMNSLEPEDTAVYYCNTINSRDGWGQGTQVTVSS

SEQ ID NO: 1040 - protein, 111 aa, Artificial Sequence
  Synthetic Sequence
EVQLVESGGGLVQAGGSLTISCAASGITFSDSIVSWYRRARGKQREWVAGISNGGTTKYAESVLGRFTISRDNAKNNVYLQMNGLNPEDTAVYLCKVRQYWGQGTQVTVSS

SEQ ID NO: 1041 - protein, 130 aa, Artificial Sequence
  Synthetic Sequence
EVQLVESGGGLVQAGGSLRLSCAASESTVLINAMGWYRQAPGKQRELVASISSGGSTNYADSVKGRFTISRDNAKNTVYLQMNSLKPEDTAVYYCNADVYPQDYGLGYVEGKVYYGHDYWGTGTLVTVSS

SEQ ID NO: 1042 - protein, 119 aa, Artificial Sequence
  Synthetic Sequence
EVQLVESGGGLVQAGGSLRLSCAASGSTFSNYVSNYAMGWGRQAPGTQRELVASISNGDTTNYADSVKGRFTISRDNAKNTVYLQMNSLKPEDTAVYYCFEHQVAGLTWGQGTQVTVSS

SEQ ID NO: 1043 - protein, 118 aa, Artificial Sequence
  Synthetic Sequence
  misc_feature (27)..(27): Xaa can be any naturally occurring amino acid
  misc_feature (32)..(32): Xaa can be any naturally occurring amino acid
  misc_feature (75)..(75): Xaa can be any naturally occurring amino acid
EVQLVESGGGLVQAGGSLRLSCVASGXALKIXVMGWYRQAPGKQRELVAAITSGGRTNYSDSVKGRFTISGDNAXNTVYLQMNSLKSEDTAVYYCREWNSGYPPVDYWGQGTQVTVSS

SEQ ID NO: 1044 - protein, 120 aa, Artificial Sequence
  Synthetic Sequence
EVQLVESGGGLVQAGGSLRLSCAASGRTFSSGTMGWFRRAPGKEREFVASIPWSGGRTYYADSVKDRFTISRDNAQNTVFLQMNSLKPEDTAVYYCAFKERSTGWDFASWGQGIQVTVSS

SEQ ID NO: 1045 - protein, 127 aa, Artificial Sequence
  Synthetic Sequence
EVQLVESGGGLVQTGGSLRLSCAASGFTLDYYGIGWFRQAPGKEREGVSFISGSDGSTYYAESVKGRFTISRDKAKNTVYLQMNSLKPEDTAVYYCAADPWGPPSIATMTSYEYKHWGQGTQVTVSS

SEQ ID NO: 1046 - protein, 113 aa, Artificial Sequence
  Synthetic Sequence
EVQLVESGGGLVQPGGSLRLSCAASGFTFSTYTMIWLRRAPGKGFEWVSTIDKDGNTNYVDSVKGRFAVSRDNTKNTLYLQMNSLKPEDTAMYYCTKHGSSARGQGTRVTVSS

SEQ ID NO: 1047 - protein, 114 aa, Artificial Sequence
  Synthetic Sequence
EVQLVESGGGLVEPGGSLRLSCVASGFTFSSYDMSWVRQAPGKGLEWVSTINSGGGITYRGSVKGRFTISRDNAKNTLYLQMNSLKPEDTAVYYCENGGSSYRRGQGTQVTVSS

SEQ ID NO: 1048 - protein, 114 aa, Artificial Sequence
  Synthetic Sequence
QVQLVQSGAELKKPGASVKMSCKASGYTFTGYTMHWVKQAPGQGLEWIGYINPRSGYTEYNQKFKDRTTLTADKSTSTAYMELSSLRSEDSAVYYCARPWFAYWGQGTLVTVSS

SEQ ID NO: 1049 - protein, 114 aa, Artificial Sequence
  Synthetic Sequence
QVQLVQSGAEVKKPGASVKMSCKASGYTFTGYTMHWVKQAPGQGLEWIGYINPRSGYTEYNQKFKDRTTLTADKSTSTAYMELSSLRSEDTAVYYCARPWFAYWGQGTLVTVSS

SEQ ID NO: 1050 - protein, 114 aa, Artificial Sequence
  Synthetic Sequence
QVQLVQSGAEVKKPGASVKMSCKASGYTFTGYTMHWVRQAPGQGLEWIGYINPRSGYTEYNQKFKDRTTLTADKSTSTAYMELSSLRSEDTAVYYCARPWFAYWGQGTLVTVSS

SEQ ID NO: 1051 - protein, 114 aa, Artificial Sequence
  Synthetic Sequence
QVQLVQSGAEVKKPGASVKVSCKASGYTFTGYTMHWVRQAPGQGLEWIGYINPRSGYTEYNQKFKDRTTLTADKSTSTAYMELSSLRSEDTAVYYCARPWFAYWGQGTLVTVSS

SEQ ID NO: 1052 - protein, 114 aa, Artificial Sequence
  Synthetic Sequence
QVQLVQSGAEVKKPGASVKVSCKASGYTFTGYTMHWVRQAPGQGLEWIGYINPRSGYTEYNQKFKDRTTITADKSTSTAYMELSSLRSEDTAVYYCARPWFAYWGQGTLVTVSS

SEQ ID NO: 1053 - protein, 113 aa, Artificial Sequence
  Synthetic Sequence
DIVMTQSPASLTVTPGEKVTITCKSSQSLLNSGNQKNYLTWYQQKPGQPPKLLIYWASTRESGVPDRFTGSGSGTDFTLTISSLQAEDVAVYYCQNDYSYPLTFGQGTKLEIK

SEQ ID NO: 1054 - protein, 113 aa, Artificial Sequence
  Synthetic Sequence
DIVMTQSPASLSVTPGEKVTITCKSSQSLLNSGNQKNYLTWYQQKPGQPPKLLIYWASTRESGVPDRFTGSGSGTDFTLTISSLQAEDVAVYYCQNDYSYPLTFGQGTKLEIK

SEQ ID NO: 1055 - protein, 113 aa, Artificial Sequence
  Synthetic Sequence
DIVMTQSPAFLSVTPGEKVTITCKSSQSLLNSGNQKNYLTWYQQKPGQPPKLLIYWASTRESGVPDRFTGSGSGTDFTLTISSLQAEDVAVYYCQNDYSYPLTFGQGTKLEIK

SEQ ID NO: 1056 - protein, 113 aa, Artificial Sequence
  Synthetic Sequence
DIVMTQSPAFLSVTPGEKVTITCKSSQSLLNSGNQKNYLTWYQQKPGQPPKLLIYWASTRESGVPDRFSGSGSGTDFTLTISSLQAEDVAVYYCQNDYSYPLTFGQGTKLEIK

SEQ ID NO: 1057 - protein, 504 aa, Homo sapiens
  MISC_FEATURE: exemplary human SIRP1alpha polypeptide
  MISC_FEATURE: exemplary human SIRP1alpha polypeptide with a signal peptide sequence
MEPAGPAPGRLGPLLCLLLAASCAWSGVAGEEELQVIQPDKSVLVAAGETATLRCTATSLIPVGPIQWFRGAGPGRELIYNQKEGHFPRVTTVSDLTKRNNMDFSIRIGNITPADAGTYYCVKFRKGSPDDVEFKSGAGTELSVRAKPSAPVVSGPAARATPQHTVSFTCESHGFSPRDITLKWFKNGNELSDFQTNVDPVGESVSYSIHSTAKVVLTREDVHSQVICEVAHVTLQGDPLRGTANLSETIRVPPTLEVTQQPVRAENQVNVTCQVRKFYPQRLQLTWLENGNVSRTETASTVTENKDGTYNWMSWLLVNVSAHRDDVKLTCQVEHDGQPAVSKSHDLKVSAHPKEQGSNTAAENTGSNERNIYIVVGVVCTLLVALLMAALYLVRIRQKKAQGSTSSTRLHEPEKNAREITQDTNDITYADLNLPKGKKPAPQAAEPNNHTEYASIQTSPQPASEDTLTYADLDMVHLNRTPKQPAPKPEPSFSEYASVQVPRK

SEQ ID NO: 1058 - protein, 474 aa, Homo sapiens
  MISC_FEATURE: exemplary human SIRP1alpha polypeptide without a signal peptide sequence
EEELQVIQPDKSVLVAAGETATLRCTATSLIPVGPIQWFRGAGPGRELIYNQKEGHFPRVTTVSDLTKRNNMDFSIRIGNITPADAGTYYCVKFRKGSPDDVEFKSGAGTELSVRAKPSAPVVSGPAARATPQHTVSFTCESHGFSPRDITLKWFKNGNELSDFQTNVDPVGESVSYSIHSTAKVVLTREDVHSQVICEVAHVTLQGDPLRGTANLSETIRVPPTLEVTQQPVRAENQVNVTCQVRKFYPQRLQLTWLENGNVSRTETASTVTENKDGTYNWMSWLLVNVSAHRDDVKLTCQVEHDGQPAVSKSHDLKVSAHPKEQGSNTAAENTGSNERNIYIVVGVVCTLLVALLMAALYLVRIRQKKAQGSTSSTRLHEPEKNAREITQDTNDITYADLNLPKGKKPAPQAAEPNNHTEYASIQTSPQPASEDTLTYADLDMVHLNRTPKQPAPKPEPSFSEYASVQVPRK

SEQ ID NO: 1059 - protein, 508 aa, Homo sapiens
  MISC_FEATURE: SIRP1alpha targeting moiety
MEPAGPAPGRLGPLLCLLLAASCAWSGVAGEEELQVIQPDKSVLVAAGETATLRCTATSLIPVGPIQWFRGAGPGRELIYNQKEGHFPRVTTVSDLTKRNNMDFSIRIGNITPADAGTYYCVKFRKGSPDDVEFKSGAGTELSVRAKPSAPVVSGPAARATPQHTVSFTCESHGFSPRDITLKWFKNGNELSDFQTNVDPVGESVSYSIHSTAKVVLTREDVHSQVICEVAHVTLQGDPLRGTANLSETIRVPPTLEVTQQPVRAENQVNVTCQVRKFYPQRLQLTWLENGNVSRTETASTVTENKDGTYNWMSWLLVNVSAHRDDVKLTCQVEHDGQPAVSKSHDLKVSAHPKEQGSNTAAENTGSNERNIYIVVGVVCTLLVALLMAALYLVRIRQKKAQGSTSSTRLHEPEKNAREITQVQSLDTNDITYADLNLPKGKKPAPQAAEPNNHTEYASIQTSPQPASEDTLTYADLDMVHLNRTPKQPAPKPEPSFSEYASVQVPRK

SEQ ID NO: 1060 - protein, 503 aa, Homo sapiens
  MISC_FEATURE: a polypeptide encoding human SIRP1alpha isoform 4
  MISC_FEATURE: polypeptide encoding human SIRP1alpha isoform 4
MEPAGPAPGRLGPLLCLLLAASCAWSGVAGEEELQVIQPDKSVLVAAGETATLRCTATSLIPVGPIQWFRGAGPGRELIYNQKEGHFPRVTTVSDLTKRNNMDFSIRIGNITPADAGTYYCVKFRKGSPDVEFKSGAGTELSVRAKPSAPVVSGPAARATPQHTVSFTCESHGFSPRDITLKWFKNGNELSDFQTNVDPVGESVSYSIHSTAKVVLTREDVHSQVICEVAHVTLQGDPLRGTANLSETIRVPPTLEVTQQPVRAENQVNVTCQVRKFYPQRLQLTWLENGNVSRTETASTVTENKDGTYNWMSWLLVNVSAHRDDVKLTCQVEHDGQPAVSKSHDLKVSAHPKEQGSNTAAENTGSNERNIYIVVGVVCTLLVALLMAALYLVRIRQKKAQGSTSSTRLHEPEKNAREITQDTNDITYADLNLPKGKKPAPQAAEPNNHTEYASIQTSPQPASEDTLTYADLDMVHLNRTPKQPAPKPEPSFSEYASVQVPRK

SEQ ID NO: 1061 - protein, 760 aa, Homo sapiens [sequence omitted]

SEQ ID NO: 1062 - protein, 134 aa, Homo sapiens
QVQLQESGGGLVQAGGSLRLSCAASGGFDSRNAMGWYRQAPGKRREWVATITSDGRTNYADSVKARFTISRDNSKNTVYLQMNSLKPEDTAVYYCNAAPPIFGSWGQGTQVTVSSAAAYPYDVPDYGSHHHHHH

SEQ ID NO: 1063 - protein, 134 aa, Homo sapiens
QVQLQESGGGLVRAGGSLRLSCAASGTFDSRNAMGWYRQAPGKRREWVATITTDGRTNYADSVKARFTISRDNAKNTVYLQMNSLKPEDTAVYYCNAAPPIFGSWGQGTQVTVSSAAAYPYDVPDYGSHHHHHH

SEQ ID NO: 1064 - protein, 134 aa, Homo sapiens
QVQLQESGGGLVQAGGSLRLSCAASGSFDSRNAMGWYRQAPGKRREWVATITTDGRTNYADSVKARFTVSRDNAKNTVYLQMNSLKPDDTAVYYCNAAPPIFNSWGQGTQVTVSSAAAYPYDVPDYGSHHHHHH

SEQ ID NO: 1065 - protein, 134 aa, Homo sapiens
QVQLQESGGGLVQAGGSLRLSCAASGSIDIRNAMGWYRQAPGTRREWVATITTDGRTNYADSVKARFTISRDNAKNTVYLQMNSLKPEDTAVYYCNLAPPIFGSWGQGTQVTVSSAAAYPYDVPDYGSHHHHHH

SEQ ID NO: 1066 - protein, 134 aa, Homo sapiens
QVQLQESGGGLVQAGGSLRLSCAASGSIDSRNTMGWYRQAPGKRREWVATITTGGRTNYADSVKARFTISRDNAKNTVYLQMNSLKPEDTAVYYCNLAPPIFNSWGQGTQVTVSSAAAYPYDVPDYGSHHHHHH

SEQ ID NO: 1067 - protein, 134 aa, Homo sapiens
QVQLQESGGGLVQAGGSLRLSCTVAESIDVRNAMGWYRQAPGKRREWVATITTGGRTNYADSVKARFTISRDNAKNTVYLQMNSLKPEDTAVYYCNAAPPILNSWGQGTQVTVSSAAAYPYDVPDYGSHHHHHH

SEQ ID NO: 1068 - protein, 134 aa, Homo sapiens
QVQLQESGGGLVRVGGSLRLSCAVSGSFDSRNSMGWYRQAPGKRREWVATITSGSRTNYADSVKARFTISRDNAKNTVYLQMDSLKPEDTAVYYCNAAPPIFNSWGQGTQVTVSSAAAYPYDVPDYGSHHHHHH

SEQ ID NO: 1069 - protein, 134 aa, Homo sapiens
QVQLQESGGGLVQAGGSLRLSCAVSGRLFSANTMGWYRQAPGKRRELVATILSSGSTNYADSVKGRFTISRDDAKNTVYLQMNSLKPEDTAVYYCNLAPPPEGYWGQGTQVTVSSAAAYPYDVPDYGSHHHHHH

SEQ ID NO: 1070 - protein, 134 aa, Homo sapiens
QVQLQESGGGLVQAGGSLRLSCAVSGRLFSANTMGWYRQAPGKRRELVATILSSGSTNYADSVKGRFTISRDDGKNTVYLQMNSLKPDDTAVYYCNFAPPPEGYWGQGTQVTVSSAAAYPYDVPDYGSHHHHHH

SEQ ID NO: 1071 - protein, 136 aa, Homo sapiens
QVQLQESGGGLVQAGGSLRLSCAASGSIFVGNAMGWYRQALGNQRELVAGITSDGTTYYPDSVKGRFTISRDNDKNTIYLQMNSLKPEDTAVYYCNLWPPRIGFASWGQGTQVTVSSAAAYPYDVPDYGSHHHHHH

SEQ ID NO: 1072 - protein, 136 aa, Homo sapiens
QVQLQESGGGLVQTGGSLRLSCAASGSIFVGNAMGWYRQALGNQRELVAGITSDGTTYYPDSVKGRFTISRDNDKNTIYLQMNSLKPEDTAVYYCNLWPPRIGFASWGQGTQVTVSSAAAYPYDVPDYGSHHHHHH

SEQ ID NO: 1073 - protein, 136 aa, Homo sapiens
QVQLQESGGGLVRAGGSLRLSCAASGSIFVGNAMGWYRQALGNQRELVAGITSDGTTYYPDSVKGRFTISRDNDKNTIYLQMNSLKPEDTAVYYCNLWPPRIGFASWGQGTQVTVSSAAAYPYDVPDYGSHHHHHH

SEQ ID NO: 1074 - protein, 136 aa, Homo sapiens; identical to SEQ ID NO: 1072

SEQ ID NO: 1075 - protein, 136 aa, Homo sapiens
QVQLQESGGGLVQAGGSLRLSCAASGSISMLNSMGWYRQALGKQREFVAGITSGGRTNYADSVKGRFAISRDNDKNTVYLQMNSLKPEDTAVYYCNTWPPRIAFDSWGQGTQVTVSSAAAYPYDVPDYGSHHHHHH

SEQ ID NO: 1076 - protein, 140 aa, Homo sapiens
QVQLQESGGGLVQAGGSLRLSCAASGSIFSSNAMGWYRQAAGKRRELVAGIRSDGNTNYVDSVKGRFTISRDRAKNTVYLQMTSLKPEDTAVYYCNYWPPPLRQGGDYAYWGQGTQVTVSSAAAYPYDVPDYGSHHHHHH

SEQ ID NO: 1077 - protein, 136 aa, Homo sapiens
QVQLQESGGGLVQAGGSLRLSCVVSGSFDSRNAMAWYRQALGKERVWVAGIISDGSTNYADAVKGRFTISRDNDKNTVYLQMNSLKPEDTAVYYCNAWPPRIGLGSWGQGTQVTVSSAAAYPYDVPDYGSHHHHHH

SEQ ID NO: 1078 - protein, 135 aa, Homo sapiens
QVQLQESGGGLVQAGGSLRLSCAASGTMSSINAMGWYRQAPGKQRELVAGILSDGTTKYVESVKGRFTISRDNAKNTVHLQMNSLKVEDTAVYYCNFFPPPVPASWGQGTQVTVSSAAAYPYDVPDYGSHHHHHH

SEQ ID NO: 1079 - protein, 134 aa, Homo sapiens
QVQLQESGGGLVQAGGSLRLSCAVSGIISSMNAMGWYRQAPGKRRELVAGLGSGVSTTYADAVKGRFTISRDNAKNTLYLQMNSLKPEDTAVYYCNRWPPPYDYWGQGTQVTVSSAAAYPYDVPDYGSHHHHHH

SEQ ID NO: 1080 - protein, 137 aa, Homo sapiens
QVQLQESGGGLVQAGGSLRLSCVVSGTILSSNSMGWYRQAPGKRRELVASISTDGSTNYADSVKGRFTISRDNAKSTVFLQMNSLKPEDTAVYYCNFHPPVVRDWGDTYWGTQVTVSSAAAYPYDVPDYGSHHHHHH

SEQ ID NO: 1081 - protein, 136 aa, Homo sapiens
QVQLQESGGGLVQAGGSLRLSCAASRSIFSIGTMGWYRQAPGKRRELVAFITVDHNTYYTDSVKGRFTISTENDKNTVYLQMNSLKPEDTAVYYCNRAPPSTDGDRWGQGTQVTVSSAAAYPYDVPDYGSHHHHHH

SEQ ID NO: 1082 - protein, 142 aa, Homo sapiens
QVQLQESGGGLVQAGGSLRLSCAASGRTFSTYAMGWFRQAPGKERELVAAISNGGSAYYADSVKGRFTISRDNARNTVYLQTNSLKPEDTAVYYCAARRGSAYYTNRIDWPYWGQGTQVTVSSAAAYPYDVPDYGSHHHHHH

SEQ ID NO: 1083 - protein, 142 aa, Homo sapiens
QVQLQESGGGLVQAGGSLRLSCAASGRTFSSYAMGWFRQAPGKERELVAAISNGGSAYYADSVKGRFTISRDNARNTVYLQTNSLKPEDTAVYYCAARRGSAYYTNRIDWPYWGQGTQVTVSSAAAYPYDVPDYGSHHHHHH

SEQ ID NO: 1084 - protein, 142 aa, Homo sapiens
QVQLQESGGGLVEAEGSLRLSCIASGRTFGTYAMGWFRQAPGKERELVAAISSGGSAYYADSVKGRFTISRDNARNTVYLQTNSLKPEDTAVYYCAARRGSAYYTNRIDWPYWGQGTQVTVSSAAAYPYDVPDYGSHHHHHH

SEQ ID NO: 1085 - protein, 142 aa, Homo sapiens
QVQLQESGGGLVEAEGSLRLSCIASGRTFGTYAMGWFRQAPGKERELVAAISTGGSTYYADSVKGRFTISRDNARNTVYLQTNSLKPEDTAVYYCAARRGSAYYTNHVDWPYWGQGTQVTVSSAAAYPYDVPDYGSHHHHHH

SEQ ID NO: 1086 - protein, 142 aa, Homo sapiens
QVQLQESGGGLVEAEGSLRLSCAASGRTFGSYAMGWFRQAPGKSRELVAAISSGGTTYYADSVKGRFTISRDNARNTVYLQTNSLKPEDTAVYYCAARTGSAYYTNRIDWPYWGQGTQVTVSSAAAYPYDVPDYGSHHHHHH

SEQ ID NO: 1087 - protein, 142 aa, Homo sapiens
QVQLQESGGGLVEAEGSLRLSCAASGRTFGSYAMGWFRQAPGKSRELVAAISSGGTTYYADSVKGRFTISRDNARNTVYLQTNSPKPEDTAVYYCAARTGSAYYTNRIDWPYWGQGTQVTVSSAAAYPYDVPDYGSHHHHHH

SEQ ID NO: 1088 - protein, 142 aa, Homo sapiens
QVQLQESGGGLVEAEGSLRLSCAASGRTFGTYALAWFRQAPGKSRELVAAISSGGSTYYADSVKGRFTISRDNARNTVYLQTNSLKPEDTAVYYCAAKTGSAYYTNRIDWPYWGQGTQVTVSSAAAYPYDVPDYGSHHHHHH

SEQ ID NO: 1089 - protein, 142 aa, Homo sapiens
QVQLQESGGGLVEAEGSLRLSCAASGRAFGSYAMGWFRQAPGLERELVAAISSGGTTYYADSVKGRFTISRDNARNTVYLQTNSLKPEDTAVYYCAARTGGAAYTRRIDWPYWGQGTQVTVSSAAAYPYDVPDYGSHHHHHH

SEQ ID NO: 1090 - protein, 142 aa, Homo sapiens
QVQLQESGGGLVEAEGSLRLSCAASGRTFGSYAMGWFRQAAGKERELVAAISAGGSTLYADNVKGRFTISRDNARNTVYLLSNSLKPEDTAVYYCAARRGSAYYTNHIDWPYWGQGTQVTVSSAAAYPYDVPDYGSHHHHHH

SEQ ID NO: 1091 - protein, 142 aa, Homo sapiens
QVQLQESGGGLVQPGGSLRLSCAASGRTFGSYAMGWFRQAAGKERELVAAISAGGSTLYADNVKGRFTISRDNARNTVYLLSNSLKPEDTAVYYCAARRGSAYYTNHIDWPYWGQGTQVTVSSAAAYPYDVPDYGSHHHHHH

SEQ ID NO: 1092 - protein, 142 aa, Homo sapiens
QVQLQESGGGLVEAEGSLRLSCAASGRTFGSYAMGWFRQAPGKERELVAAISSGGSTLYADSVKGRFTISRDNAKNTVYLQMNSLKPEDTAVYYCAARSGGAYYTARVDWPYWGQGTQVTVSSAAAYPYDVPDYGSHHHHHH

SEQ ID NO: 1093 - protein, 142 aa, Homo sapiens
QVQLQESGGGLVEAEGSLRLSCAASGRTFGSYAMGWFRQAPGKERELVAAISSGGSTLYAGSVKGRFTISKDNAKNTVYLQMNSLKPEDTAVYYCAARSGGAYYTARVDWPYWGQGTQVTVSSAAAYPYDVPDYGSHHHHHH

SEQ ID NO: 1094 - protein, 142 aa, Homo sapiens
QVQLQESGGGLVEAEGSPRLSCAASGRTFGSYAMGWFRQAPGKERELVAAISSGGITYYADSVKGRFTISRDNAKNTVYLQMNSLKPEDTAVYYCAARSGSAYYTTRVDWPYWGQGTQVTVSSAAAYPYDVPDYGSHHHHHH

SEQ ID NO: 1095 - protein, 142 aa, Homo sapiens
QVQLQESGGGLVQAGGSLRLSCAASGNIDSIASMGWYRQAPGKQRELVAAISVGGSTYYADSVKGRFTISRDNARNTVYLQTNSLKPEDTAVYYCAARRGSAYYTSRIDWPYWGQGTQVTVSSAAAYPYDVPDYGSHHHHHH

SEQ ID NO: 1096 - protein, 142 aa, Homo sapiens
QVQLQESGGGLVQAEGSLRLSCAASGRTFGSYAMGWFRQAPGKERELVAGISSGGITNYAHSVKGRFTISRDIDKNTVFLQMNSLKPEDTAVYYCAARSGGAYYTSRVDWPYWGQGTQVTVSSAAAYPYDVPDYGSHHHHHH

SEQ ID NO: 1097 - protein, 142 aa, Homo sapiens
  misc_feature (13)..(13): Xaa can be any naturally occurring amino acid
QVQLQESGGGLVXAGGSLRLSCAASGRTFSDYAMGWFRQAPGKEREFIAGISWGGSSTYYADSVKGRFTISRDNAKNTMYLQMNSLKPEDTAVYYCAARLSGVSRSDRPYDYWGQGTQVTVSSAAAYPYDVPDYGSHHHHHH

SEQ ID NO: 1098 - protein, 142 aa, Homo sapiens
QVQLQESGGGLVQAGGSLRLSCAASGRTFSMYAIGWFRQAPGKERELVASISSGGSTNYADSVKGRFTISRDNAEKTVYLQMMSLEPEATGVYYCAARDGSALYTAHSDWDYWGQGTQVTVSSAAAYPYDVPDYGSHHHHHH

SEQ ID NO: 1099 - protein, 142 aa, Homo sapiens
QVQLQESGGGLVQPGDSLRLSCAASERTFSMYAIGWFRQAPGKERELVAGISSGGSTNYADSVKGRFTISRDNPKKTVYLQMMSLEPEDTGVYYCAARSGSAYFSGRYYWNYWGQGTQVTVSSAAAYPYDVPDYGSHHHHHH

SEQ ID NO: 1100 - protein, 142 aa, Homo sapiens
QVQLQESGGGLVQAGDSLRLSCAASGRTFSSYVMGWFRQVPGKQRELVAAITSGLSTYYADSLKGRFTISRDNAKNTMYLQMNSLKLEDTAVYYCAAREGGGIWTSSTQYDYWGQGTQVTVSSAAAYPYDVPDYGSHHHHHH

SEQ ID NO: 1101 - protein, 137 aa, Homo sapiens
QVQLQESGGGLVQAGGSLRLSCVASGTIFSSGAMAMGWYRQAPGKQREWVAGITGSRTTTYADSVKGRFTISRDNAENTVFLQMNNLKSEDTAVYYCNLWPPSRPDHWGQGTQVTVSSAAAYPYDVPDYGSHHHHHH

SEQ ID NO: 1102 - protein, 134 aa, Homo sapiens
QVQLQESGGGLVQAGGSLRLSCVASGTISSGAMGWYRQVPGKQREWVAGITGSRTTMYTESVKGRFTISRDNAENTVFLQMNNLKSEDTAVYYCNLWPPSRPDYWGQGTQVTVSSAAAYPYDVPDYGSHHHHHH

SEQ ID NO: 1103 - protein, 115 aa, Homo sapiens
QVQLQESGGGLVQAGGSLRLSCAASGGFDSRNAMGWYRQAPGKRREWVATITSDGRTNYADSVKARFTISRDNSKNTVYLQMNSLKPEDTAVYYCNAAPPIFGSWGQGTQVTVSS

SEQ ID NO: 1104 - protein, 115 aa, Homo sapiens
QVQLQESGGGLVRAGGSLRLSCAASGTFDSRNAMGWYRQAPGKRREWVATITTDGRTNYADSVKARFTISRDNAKNTVYLQMNSLKPEDTAVYYCNAAPPIFGSWGQGTQVTVSS

SEQ ID NO: 1105 - protein, 115 aa, Homo sapiens
QVQLQESGGGLVQAGGSLRLSCAASGSFDSRNAMGWYRQAPGKRREWVATITTDGRTNYADSVKARFTVSRDNAKNTVYLQMNSLKPDDTAVYYCNAAPPIFNSWGQGTQVTVSS

SEQ ID NO: 1106 - protein, 115 aa, Homo sapiens
QVQLQESGGGLVQAGGSLRLSCAASGSIDIRNAMGWYRQAPGTRREWVATITTDGRTNYADSVKARFTISRDNAKNTVYLQMNSLKPEDTAVYYCNLAPPIFGSWGQGTQVTVSS

SEQ ID NO: 1107 - protein, 115 aa, Homo sapiens
QVQLQESGGGLVQAGGSLRLSCAASGSIDSRNTMGWYRQAPGKRREWVATITTGGRTNYADSVKARFTISRDNAKNTVYLQMNSLKPEDTAVYYCNLAPPIFNSWGQGTQVTVSS

SEQ ID NO: 1108 - protein, 115 aa, Homo sapiens
QVQLQESGGGLVQAGGSLRLSCTVAESIDVRNAMGWYRQAPGKRREWVATITTGGRTNYADSVKARFTISRDNAKNTVYLQMNSLKPEDTAVYYCNAAPPILNSWGQGTQVTVSS

SEQ ID NO: 1109 - protein, 115 aa, Homo sapiens
QVQLQESGGGLVRVGGSLRLSCAVSGSFDSRNSMGWYRQAPGKRREWVATITSGSRTNYADSVKARFTISRDNAKNTVYLQMDSLKPEDTAVYYCNAAPPIFNSWGQGTQVTVSS

SEQ ID NO: 1110 - protein, 115 aa, Homo sapiens
QVQLQESGGGLVQAGGSLRLSCAVSGRLFSANTMGWYRQAPGKRRELVATILSSGSTNYADSVKGRFTISRDDAKNTVYLQMNSLKPEDTAVYYCNLAPPPEGYWGQGTQVTVSS

SEQ ID NO: 1111 - protein, 115 aa, Homo sapiens
QVQLQESGGGLVQAGGSLRLSCAVSGRLFSANTMGWYRQAPGKRRELVATILSSGSTNYADSVKGRFTISRDDGKNTVYLQMNSLKPDDTAVYYCNFAPPPEGYWGQGTQVTVSS

SEQ ID NO: 1112 - protein, 117 aa, Homo sapiens
QVQLQESGGGLVQAGGSLRLSCAASGSIFVGNAMGWYRQALGNQRELVAGITSDGTTYYPDSVKGRFTISRDNDKNTIYLQMNSLKPEDTAVYYCNLWPPRIGFASWGQGTQVTVSS

SEQ ID NO: 1113 - protein, 117 aa, Homo sapiens
QVQLQESGGGLVQTGGSLRLSCAASGSIFVGNAMGWYRQALGNQRELVAGITSDGTTYYPDSVKGRFTISRDNDKNTIYLQMNSLKPEDTAVYYCNLWPPRIGFASWGQGTQVTVSS

SEQ ID NO: 1114 - protein, 117 aa, Homo sapiens
QVQLQESGGGLVRAGGSLRLSCAASGSIFVGNAMGWYRQALGNQRELVAGITSDGTTYYPDSVKGRFTISRDNDKNTIYLQMNSLKPEDTAVYYCNLWPPRIGFASWGQGTQVTVSS

SEQ ID NO: 1115 - protein, 117 aa, Homo sapiens; identical to SEQ ID NO: 1113

SEQ ID NO: 1116 - protein, 117 aa, Homo sapiens
QVQLQESGGGLVQAGGSLRLSCAASGSISMLNSMGWYRQALGKQREFVAGITSGGRTNYADSVKGRFAISRDNDKNTVYLQMNSLKPEDTAVYYCNTWPPRIAFDSWGQGTQVTVSS

SEQ ID NO: 1117 - protein, 121 aa, Homo sapiens
QVQLQESGGGLVQAGGSLRLSCAASGSIFSSNAMGWYRQAAGKRRELVAGIRSDGNTNYVDSVKGRFTISRDRAKNTVYLQMTSLKPEDTAVYYCNYWPPPLRQGGDYAYWGQGTQVTVSS

SEQ ID NO: 1118 - protein, 117 aa, Homo sapiens
QVQLQESGGGLVQAGGSLRLSCVVSGSFDSRNAMAWYRQALGKERVWVAGIISDGSTNYADAVKGRFTISRDNDKNTVYLQMNSLKPEDTAVYYCNAWPPRIGLGSWGQGTQVTVSS

SEQ ID NO: 1119 - protein, 116 aa, Homo sapiens
QVQLQESGGGLVQAGGSLRLSCAASGTMSSINAMGWYRQAPGKQRELVAGILSDGTTKYVESVKGRFTISRDNAKNTVHLQMNSLKVEDTAVYYCNFFPPPVPASWGQGTQVTVSS

SEQ ID NO: 1120 - protein, 115 aa, Homo sapiens
QVQLQESGGGLVQAGGSLRLSCAVSGIISSMNAMGWYRQAPGKRRELVAGLGSGVSTTYADAVKGRFTISRDNAKNTLYLQMNSLKPEDTAVYYCNRWPPPYDYWGQGTQVTVSS

SEQ ID NO: 1121 - protein, 120 aa, Homo sapiens
QVQLQESGGGLVQAGGSLRLSCVVSGTILSSNSMGWYRQAPGKRRELVASISTDGSTNYADSVKGRFTISRDNAKSTVFLQMNSLKPEDTAVYYCNFHPPVVRDWGDTYWGTQVTVSSQG

SEQ ID NO: 1122 - protein, 117 aa, Homo sapiens
QVQLQESGGGLVQAGGSLRLSCAASRSIFSIGTMGWYRQAPGKRRELVAFITVDHNTYYTDSVKGRFTISTENDKNTVYLQMNSLKPEDTAVYYCNRAPPSTDGDRWGQGTQVTVSS

SEQ ID NO: 1123 - protein, 123 aa, Homo sapiens
QVQLQESGGGLVQAGGSLRLSCAASGRTFSTYAMGWFRQAPGKERELVAAISNGGSAYYADSVKGRFTISRDNARNTVYLQTNSLKPEDTAVYYCAARRGSAYYTNRIDWPYWGQGTQVTVSS

SEQ ID NO: 1124 - protein, 123 aa, Homo sapiens
QVQLQESGGGLVQAGGSLRLSCAASGRTFSSYAMGWFRQAPGKERELVAAISNGGSAYYADSVKGRFTISRDNARNTVYLQTNSLKPEDTAVYYCAARRGSAYYTNRIDWPYWGQGTQVTVSS

SEQ ID NO: 1125 - protein, 123 aa, Homo sapiens
QVQLQESGGGLVEAEGSLRLSCIASGRTFGTYAMGWFRQAPGKERELVAAISSGGSAYYADSVKGRFTISRDNARNTVYLQTNSLKPEDTAVYYCAARRGSAYYTNRIDWPYWGQGTQVTVSS

SEQ ID NO: 1126 - protein, 123 aa, Homo sapiens
QVQLQESGGGLVEAEGSLRLSCIASGRTFGTYAMGWFRQAPGKERELVAAISTGGSTYYADSVKGRFTISRDNARNTVYLQTNSLKPEDTAVYYCAARRGSAYYTNHVDWPYWGQGTQVTVSS

SEQ ID NO: 1127 - protein, 123 aa, Homo sapiens
QVQLQESGGGLVEAEGSLRLSCAASGRTFGSYAMGWFRQAPGKSRELVAAISSGGTTYYADSVKGRFTISRDNARNTVYLQTNSLKPEDTAVYYCAARTGSAYYTNRIDWPYWGQGTQVTVSS

SEQ ID NO: 1128 - protein, 123 aa, Homo sapiens
QVQLQESGGGLVEAEGSLRLSCAASGRTFGSYAMGWFRQAPGKSRELVAAISSGGTTYYADSVKGRFTISRDNARNTVYLQTNSPKPEDTAVYYCAARTGSAYYTNRIDWPYWGQGTQVTVSS

SEQ ID NO: 1129 - protein, 123 aa, Homo sapiens
QVQLQESGGGLVEAEGSLRLSCAASGRTFGTYALAWFRQAPGKSRELVAAISSGGSTYYADSVKGRFTISRDNARNTVYLQTNSLKPEDTAVYYCAAKTGSAYYTNRIDWPYWGQGTQVTVSS

SEQ ID NO: 1130 - protein, 123 aa, Homo sapiens
QVQLQESGGGLVEAEGSLRLSCAASGRAFGSYAMGWFRQAPGLERELVAAISSGGTTYYADSVKGRFTISRDNARNTVYLQTNSLKPEDTAVYYCAARTGGAAYTRRIDWPYWGQGTQVTVSS

SEQ ID NO: 1131 - protein, 123 aa, Homo sapiens
QVQLQESGGGLVEAEGSLRLSCAASGRTFGSYAMGWFRQAAGKERELVAAISAGGSTLYADNVKGRFTISRDNARNTVYLLSNSLKPEDTAVYYCAARRGSAYYTNHIDWPYWGQGTQVTVSS

SEQ ID NO: 1132 - protein, 123 aa, Homo sapiens
QVQLQESGGGLVQPGGSLRLSCAASGRTFGSYAMGWFRQAAGKERELVAAISAGGSTLYADNVKGRFTISRDNARNTVYLLSNSLKPEDTAVYYCAARRGSAYYTNHIDWPYWGQGTQVTVSS

SEQ ID NO: 1133 - protein, 123 aa, Homo sapiens
QVQLQESGGGLVEAEGSLRLSCAASGRTFGSYAMGWFRQAPGKERELVAAISSGGSTLYADSVKGRFTISRDNAKNTVYLQMNSLKPEDTAVYYCAARSGGAYYTARVDWPYWGQGTQVTVSS

SEQ ID NO: 1134 - protein, 123 aa, Homo sapiens
QVQLQESGGGLVEAEGSLRLSCAASGRTFGSYAMGWFRQAPGKERELVAAISSGGSTLYAGSVKGRFTISKDNAKNTVYLQMNSLKPEDTAVYYCAARSGGAYYTARVDWPYWGQGTQVTVSS

SEQ ID NO: 1135 - protein, 123 aa, Homo sapiens
QVQLQESGGGLVEAEGSPRLSCAASGRTFGSYAMGWFRQAPGKERELVAAISSGGITYYADSVKGRFTISRDNAKNTVYLQMNSLKPEDTAVYYCAARSGSAYYTTRVDWPYWGQGTQVTVSS

SEQ ID NO: 1136 - protein, 123 aa, Homo sapiens
QVQLQESGGGLVQAGGSLRLSCAASGNIDSIASMGWYRQAPGKQRELVAAISVGGSTYYADSVKGRFTISRDNARNTVYLQTNSLKPEDTAVYYCAARRGSAYYTSRIDWPYWGQGTQVTVSS

SEQ ID NO: 1137 - protein, 123 aa, Homo sapiens
QVQLQESGGGLVQAEGSLRLSCAASGRTFGSYAMGWFRQAPGKERELVAGISSGGITNYAHSVKGRFTISRDIDKNTVFLQMNSLKPEDTAVYYCAARSGGAYYTSRVDWPYWGQGTQVTVSS

SEQ ID NO: 1138 - protein, 123 aa, Homo sapiens
  misc_feature (13)..(13): Xaa can be any naturally occurring amino acid
QVQLQESGGGLVXAGGSLRLSCAASGRTFSDYAMGWFRQAPGKEREFIAGISWGGSSTYYADSVKGRFTISRDNAKNTMYLQMNSLKPEDTAVYYCAARLSGVSRSDRPYDYWGQGTQVTVSS

SEQ ID NO: 1139 - protein, 123 aa, Homo sapiens
QVQLQESGGGLVQAGGSLRLSCAASGRTFSMYAIGWFRQAPGKERELVASISSGGSTNYADSVKGRFTISRDNAEKTVYLQMMSLEPEATGVYYCAARDGSALYTAHSDWDYWGQGTQVTVSS

SEQ ID NO: 1140 - protein, 123 aa, Homo sapiens
QVQLQESGGGLVQPGDSLRLSCAASERTFSMYAIGWFRQAPGKERELVAGISSGGSTNYADSVKGRFTISRDNPKKTVYLQMMSLEPEDTGVYYCAARSGSAYFSGRYYWNYWGQGTQVTVSS

SEQ ID NO: 1141 - protein, 123 aa, Homo sapiens
QVQLQESGGGLVQAGDSLRLSCAASGRTFSSYVMGWFRQVPGKQRELVAAITSGLSTYYADSLKGRFTISRDNAKNTMYLQMNSLKLEDTAVYYCAAREGGGIWTSSTQYDYWGQGTQVTVSS

SEQ ID NO: 1142 - protein, 118 aa, Homo sapiens
QVQLQESGGGLVQAGGSLRLSCVASGTIFSSGAMAMGWYRQAPGKQREWVAGITGSRTTTYADSVKGRFTISRDNAENTVFLQMNNLKSEDTAVYYCNLWPPSRPDHWGQGTQVTVSS

SEQ ID NO: 1143 - protein, 115 aa, Homo sapiens
QVQLQESGGGLVQAGGSLRLSCVASGTISSGAMGWYRQVPGKQREWVAGITGSRTTMYTESVKGRFTISRDNAENTVFLQMNNLKSEDTAVYYCNLWPPSRPDYWGQGTQVTVSS

SEQ ID NO: 1144 - protein, 10 aa, Homo sapiens
GGFDSRNAMG

SEQ ID NO: 1145 - protein, 10 aa, Homo sapiens
GTFDSRNAMG

SEQ ID NO: 1146 - protein, 10 aa, Homo sapiens
GSFDSRNAMG

SEQ ID NO: 1147 - protein, 10 aa, Homo sapiens
GSIDIRNAMG

SEQ ID NO: 1148 - protein, 10 aa, Homo sapiens
GSIDSRNTMG

SEQ ID NO: 1149 - protein, 10 aa, Homo sapiens
ESIDVRNAMG

SEQ ID NO: 1150 - protein, 10 aa, Homo sapiens
GSFDSRNSMG

SEQ ID NO: 1151 - protein, 10 aa, Homo sapiens
GRLFSANTMG

SEQ ID NO: 1152 - protein, 10 aa, Homo sapiens
GSIFVGNAMG

SEQ ID NO: 1153 - protein, 10 aa, Homo sapiens
GSISMLNSMG

SEQ ID NO: 1154 - protein, 10 aa, Homo sapiens
GSIFSSNAMG

SEQ ID NO: 1155 - protein, 10 aa, Homo sapiens
GSFDSRNAMA

SEQ ID NO: 1156 - protein, 10 aa, Homo sapiens
GTMSSINAMG

SEQ ID NO: 1157 - protein, 10 aa, Homo sapiens
GIISSMNAMG

SEQ ID NO: 1158 - protein, 10 aa, Homo sapiens
GTILSSNSMG

SEQ ID NO: 1159 - protein, 10 aa, Homo sapiens
RSIFSIGTMG

SEQ ID NO: 1160 - protein, 10 aa, Homo sapiens
GRTFSTYAMG

SEQ ID NO: 1161 - protein, 10 aa, Homo sapiens
GRTFSSYAMG

SEQ ID NO: 1162 - protein, 10 aa, Homo sapiens
GRTFGTYAMG

SEQ ID NO: 1163 - protein, 10 aa, Homo sapiens
GRTFGSYAMG

SEQ ID NO: 1164 - protein, 10 aa, Homo sapiens
GRTFGTYALA

SEQ ID NO: 1165 - protein, 10 aa, Homo sapiens
GRAFGSYAMG

SEQ ID NO: 1166 - protein, 10 aa, Homo sapiens
GNIDSIASMG

SEQ ID NO: 1167 - protein, 10 aa, Homo sapiens
GRTFSDYAMG

SEQ ID NO: 1168 - protein, 10 aa, Homo sapiens
GRTFSMYAIG

SEQ ID NO: 1169 - protein, 10 aa, Homo sapiens
ERTFSMYAIG

SEQ ID NO: 1170 - protein, 10 aa, Homo sapiens
GRTFSSYVMG

SEQ ID NO: 1171 - protein, 12 aa, Homo sapiens
GTIFSSGAMAMG

SEQ ID NO: 1172 - protein, 9 aa, Homo sapiens
GTISSGAMG

SEQ ID NO: 1173 - protein, 9 aa, Homo sapiens
TITSDGRTN

SEQ ID NO: 1174 - protein, 9 aa, Homo sapiens
TITTDGRTN

SEQ ID NO: 1175 - protein, 9 aa, Homo sapiens
TITTGGRTN

SEQ ID NO: 1176 - protein, 9 aa, Homo sapiens
TITSGSRTN

SEQ ID NO: 1177 - protein, 9 aa, Homo sapiens
TILSSGSTN

SEQ ID NO: 1178 - protein, 9 aa, Homo sapiens
GITSDGTTY

SEQ ID NO: 1179 - protein, 9 aa, Homo sapiens
GITSGGRTN

SEQ ID NO: 1180 - protein, 9 aa, Homo sapiens
GIRSDGNTN

SEQ ID NO: 1181 - protein, 9 aa, Homo sapiens
GIISDGSTN

SEQ ID NO: 1182 - protein, 9 aa, Homo sapiens
GILSDGTTK

SEQ ID NO: 1183 - protein, 9 aa, Homo sapiens
GLGSGVSTT

SEQ ID NO: 1184 - protein, 9 aa, Homo sapiens
SISTDGSTN

SEQ ID NO: 1185 - protein, 9 aa, Homo sapiens
FITVDHNTY

SEQ ID NO: 1186 - protein, 9 aa, Homo sapiens
AISNGGSAY

SEQ ID NO: 1187 - protein, 9 aa, Homo sapiens
AISSGGSAY

SEQ ID NO: 1188 - protein, 9 aa, Homo sapiens
AISTGGSTY

SEQ ID NO: 1189 - protein, 9 aa, Homo sapiens
AISSGGTTY

SEQ ID NO: 1190 - protein, 9 aa, Homo sapiens
AISSGGSTY

SEQ ID NO: 1191 - protein, 9 aa, Homo sapiens
AISAGGSTL

SEQ ID NO: 1192 - protein, 9 aa, Homo sapiens
AISSGGSTL

SEQ ID NO: 1193 - protein, 9 aa, Homo sapiens
AISSGGITY

SEQ ID NO: 1194 - protein, 9 aa, Homo sapiens
AISVGGSTY

SEQ ID NO: 1195 - protein, 9 aa, Homo sapiens
GISSGGITN

SEQ ID NO: 1196 - protein, 10 aa, Homo sapiens
GISWGGSSTY

SEQ ID NO: 1197 - protein, 9 aa, Homo sapiens
SISSGGSTN

SEQ ID NO: 1198 - protein, 9 aa, Homo sapiens
GISSGGSTN

SEQ ID NO: 1199 - protein, 9 aa, Homo sapiens
AITSGLSTY

SEQ ID NO: 1200 - protein, 9 aa, Homo sapiens
GITGSRTTT

SEQ ID NO: 1201 - protein, 9 aa, Homo sapiens
GITGSRTTM

SEQ ID NO: 1202 - protein, 9 aa, Homo sapiens
NAAPPIFGS

SEQ ID NO: 1203 - protein, 9 aa, Homo sapiens
NAAPPIFNS

SEQ ID NO: 1204 - protein, 9 aa, Homo sapiens
NLAPPIFGS

SEQ ID NO: 1205 - protein, 9 aa, Homo sapiens
NLAPPIFNS

SEQ ID NO: 1206 - protein, 9 aa, Homo sapiens
NAAPPILNS

SEQ ID NO: 1207 - protein, 9 aa, Homo sapiens
NLAPPPEGY

SEQ ID NO: 1208 - protein, 9 aa, Homo sapiens
NFAPPPEGY

SEQ ID NO: 1209 - protein, 11 aa, Homo sapiens
NLWPPRIGFAS

SEQ ID NO: 1210 - protein, 11 aa, Homo sapiens
NTWPPRIAFDS

SEQ ID NO: 1211 - protein, 15 aa, Homo sapiens
NYWPPPLRQGGDYAY

SEQ ID NO: 1212 - protein, 11 aa, Homo sapiens
NAWPPRIGLGS

SEQ ID NO: 1213 - protein, 10 aa, Homo sapiens
NFFPPPVPAS

SEQ ID NO: 1214 - protein, 9 aa, Homo sapiens
NRWPPPYDY

SEQ ID NO: 1215 - protein, 14 aa, Homo sapiens
NFHPPVVRDWGDTY

SEQ ID NO: 1216 - protein, 11 aa, Homo sapiens
NRAPPSTDGDR

SEQ ID NO: 1217 - protein, 17 aa, Homo sapiens
AARRGSAYYTNRIDWPY

SEQ ID NO: 1218 - protein, 17 aa, Homo sapiens
AARRGSAYYTNHVDWPY

SEQ ID NO: 1219 - protein, 17 aa, Homo sapiens
AARTGSAYYTNRIDWPY

SEQ ID NO: 1220 - protein, 17 aa, Homo sapiens
AAKTGSAYYTNRIDWPY

SEQ ID NO: 1221 - protein, 17 aa, Homo sapiens
AARTGGAAYTRRIDWPY

SEQ ID NO: 1222 - protein, 17 aa, Homo sapiens
AARRGSAYYTNHIDWPY

SEQ ID NO: 1223 - protein, 17 aa, Homo sapiens
AARSGGAYYTARVDWPY

SEQ ID NO: 1224 - protein, 17 aa, Homo sapiens
AARSGSAYYTTRVDWPY

SEQ ID NO: 1225 - protein, 17 aa, Homo sapiens
AARRGSAYYTSRIDWPY

SEQ ID NO: 1226 - protein, 17 aa, Homo sapiens
AARSGGAYYTSRVDWPY

SEQ ID NO: 1227 - protein, 16 aa, Homo sapiens
AARLSGVSRSDRPYDY

SEQ ID NO: 1228 - protein, 17 aa, Homo sapiens
AARDGSALYTAHSDWDY

SEQ ID NO: 1229 - protein, 17 aa, Homo sapiens
AARSGSAYFSGRYYWNY

SEQ ID NO: 1230 - protein, 17 aa, Homo sapiens
AAREGGGIWTSSTQYDY

SEQ ID NO: 1231 - protein, 10 aa, Homo sapiens
NLWPPSRPDH

SEQ ID NO: 1232 - protein, 10 aa, Homo sapiens
NLWPPSRPDY

SEQ ID NO: 1233 - protein, 333 aa, Homo sapiens
MESSGNPESTTFFYYDLQSQPCENQAWVFATLATTVLYCLVFLLSLVGNSLVLWVLVKYESLESLTNIFILNLCLSDLVFACLLPVWISPYHWGWVLGDFLCKLLNMIFSISLYSSIFFLTIMTIHRYLSVVSPLSTLRVPTLRCRVLVTMAVWVASILSSILDTIFHKVLSSGCDYSELTWYLTSVYQHNLFFLLSLGIILFCYVEILRTLFRSRSKRRHRTVKLIFAIVVAYFLSWGPYNFTLFLQTLFRTQIIRSCEAKQQLEYALLICRNLAFSHCCFNPVLYVFVGVKFRTHLKHVLRQFWFCRLQAPSPASIPHSPGAFAYEGASFY

SEQ ID NO: 1234 - protein, 450 aa, Artificial Sequence
  Synthetic Sequence (muromonab-CD3 heavy chain)
QVQLQQSGAELARPGASVKMSCKASGYTFTRYTMHWVKQRPGQGLEWIGYINPSRGYTNYNQKFKDKATLTTDKSSSTAYMQLSSLTSEDSAVYYCARYYDDHYCLDYWGQGTTLTVSSAKTTAPSVYPLAPVCGGTTGSSVTLGCLVKGYFPEPVTLTWNSGSLSSGVHTFPAVLQSDLYTLSSSVTVTSSTWPSQSITCNVAHPASSTKVDKKIEPRPKSCDKTHTCPPCPAPELLGGPSVFLFPPKPKDTLMISRTPEVTCVVVDVSHEDPEVKFNWYVDGVEVHNAKTKPREEQYNSTYRVVSVLTVLHQDWLNGKEYKCKVSNKALPAPIEKTISKAKGQPREPQVYTLPPSRDELTKNQVSLTCLVKGFYPSDIAVEWESNGQPENNYKTTPPVLDSDGSFFLYSKLTVDKSRWQQGNVFSCSVMHEALHNHYTQKSLSLSPGK

SEQ ID NO: 1235 - protein, 213 aa, Artificial Sequence
  Synthetic Sequence (muromonab-CD3 light chain)
QIVLTQSPAIMSASPGEKVTMTCSASSSVSYMNWYQQKSGTSPKRWIYDTSKLASGVPAHFRGSGSGTSYSLTISGMEAEDAATYYCQQWSSNPFTFGSGTKLEINRADTAPTVSIFPPSSEQLTSGGASVVCFLNNFYPKDINVKWKIDGSERQNGVLNSWTDQDSKDSTYSMSSTLTLTKDEYERHNSYTCEATHKTSTSPIVKSFNRNEC

SEQ ID NO: 1236 - protein, 449 aa, Artificial Sequence
  Synthetic Sequence (otelixizumab heavy chain)
EVQLLESGGGLVQPGGSLRLSCAASGFTFSSFPMAWVRQAPGKGLEWVSTISTSGGRTYYRDSVKGRFTISRDNSKNTLYLQMNSLRAEDTAVYYCAKFRQYSGGFDYWGQGTLVTVSSASTKGPSVFPLAPSSKSTSGGTAALGCLVKDYFPEPVTVSWNSGALTSGVHTFPAVLQSSGLYSLSSVVTVPSSSLGTQTYICNVNHKPSNTKVDKKVEPKSCDKTHTCPPCPAPELLGGPSVFLFPPKPKDTLMISRTPEVTCVVVDVSHEDPEVKFNWYVDGVEVHNAKTKPREEQYASTYRVVSVLTVLHQDWLNGKEYKCKVSNKALPAPIEKTISKAKGQPREPQVYTLPPSRDELTKNQVSLTCLVKGFYPSDIAVEWESNGQPENNYKTTPPVLDSDGSFFLYSKLTVDKSRWQQGNVFSCSVMHEALHNHYTQKSLSLSPGK

SEQ ID NO: 1237 - protein, 216 aa, Artificial Sequence
  Synthetic Sequence (otelixizumab light chain)
DIQLTQPNSVSTSLGSTVKLSCTLSSGNIENNYVHWYQLYEGRSPTTMIYDDDKRPDGVPDRFSGSIDRSSNSAFLTIHNVAIEDEAIYFCHSYVSSFNVFGGGTKLTVLRQPKAAPSVTLFPPSSEELQANKATLVCLISDFYPGAVTVAWKADSSPVKAGVETTTPSKQSNNKYAASSYLSLTPEQWKSHRSYSCQVTHEGSTVEKTVAPTECS

SEQ ID NO: 1238 - protein, 449 aa, Artificial Sequence
  Synthetic Sequence (teplizumab heavy chain)
QVQLVQSGGGVVQPGRSLRLSCKASGYTFTRYTMHWVRQAPGKGLEWIGYINPSRGYTNYNQKVKDRFTISRDNSKNTAFLQMDSLRPEDTGVYFCARYYDDHYCLDYWGQGTPVTVSSASTKGPSVFPLAPSSKSTSGGTAALGCLVKDYFPEPVTVSWNSGALTSGVHTFPAVLQSSGLYSLSSVVTVPSSSLGTQTYICNVNHKPSNTKVDKKVEPKSCDKTHTCPPCPAPEAAGGPSVFLFPPKPKDTLMISRTPEVTCVVVDVSHEDPEVKFNWYVDGVEVHNAKTKPREEQYNSTYRVVSVLTVLHQDWLNGKEYKCKVSNKALPAPIEKTISKAKGQPREPQVYTLPPSRDELTKNQVSLTCLVKGFYPSDIAVEWESNGQPENNYKTTPPVLDSDGSFFLYSKLTVDKSRWQQGNVFSCSVMHEALHNHYTQKSLSLSPGK

SEQ ID NO: 1239 - protein, 213 aa, Artificial Sequence
  Synthetic Sequence (teplizumab light chain)
DIQMTQSPSSLSASVGDRVTITCSASSSVSYMNWYQQTPGKAPKRWIYDTSKLASGVPSRFSGSGSGTDYTFTISSLQPEDIATYYCQQWSSNPFTFGQGTKLQITRTVAAPSVFIFPPSDEQLKSGTASVVCLLNNFYPREAKVQWKVDNALQSGNSQESVTEQDSKDSTYSLSSTLTLSKADYEKHKVYACEVTHQGLSSPVTKSFNRGEC

SEQ ID NO: 1240 - protein, 120 aa, Artificial Sequence [sequence omitted]

SEQ ID NO: 1241 - protein, 106 aa, Artificial Sequence [sequence omitted]

SEQ ID NO: 1242 - protein, 118 aa, Artificial Sequence [sequence omitted]

SEQ ID NO: 1243 - protein, 118 aa, Artificial Sequence
  Synthetic Sequence
QVQLVQSGGGVVQSGRSLRLSCAASGFKFSGYGMHWVRQAPGKGLEWVAVIWYDGSKKYYVDSVKGRFTISRDNSKNTLYLQMNSLRGEDTAVYYCARQMGYWHFDLWGRGTLVTVSS

SEQ ID NO: 1244 - protein, 108 aa, Artificial Sequence [sequence omitted]

SEQ ID NO: 1245 - protein, 108 aa, Artificial Sequence [sequence omitted]

SEQ ID NO: 1246 - protein, 125 aa, Artificial Sequence
  Synthetic Sequence
EVKLVESGGGLVQPGGSLRLSCAASGFTFNTYAMNWVRQAPGKGLEWVARIRSKYNNYATYYADSVKDRFTISRDDSKSSLYLQMNNLKTEDTAMYYCVRHGNFGNSYVSWFAYWGQGTLVTVSS

SEQ ID NO: 1247 - protein, 125 aa, Artificial Sequence
  Synthetic Sequence
EVKLVESGGGLVKPGRSLRLSCAASGFTFNTYAMNWVRQAPGKGLEWVARIRSKYNNYATYYADSVKDRFTISRDDSKSILYLQMNNLKTEDTAMYYCVRHGNFGNSYVSWFAYWGQGTLVTVSS

SEQ ID NO: 1248 - protein, 125 aa, Artificial Sequence
  Synthetic Sequence
EVKLVESGGGLVKPGRSLRLSCAASGFTFNTYAMNWVRQAPGKGLEWVARIRSKYNNYATYYADSVKDRFTISRDDSKSILYLQMNSLKTEDTAMYYCVRHGNFGNSYVSWFAYWGQGTLVTVSS

SEQ ID NO: 1249 - protein, 125 aa, Artificial Sequence
  Synthetic Sequence
EVKLVESGGGLVKPGRSLRLSCAASGFTFNTYAMNWVRQAPGKGLEWVARIRSKYNNYATYYADSVKDRFTISRDDSKSILYLQMNSLKTEDTAMYYCVRHGNFGNSYVSWFAYWGQGTMVTVSS

SEQ ID NO: 1250 - protein, 109 aa, Artificial Sequence
  Synthetic Sequence
QAVVTQEPSFSVSPGGTVTLTCRSSTGAVTTSNYANWVQQTPGQAFRGLIGGTNKRAPGVPARFSGSLIGDKAALTITGAQADDESIYFCALWYSNLWVFGGGTKLTVL

SEQ ID NO: 1251 - protein, 109 aa, Artificial Sequence
  Synthetic Sequence
QAVVTQEPSFSVSPGGTVTLTCRSSTGAVTTSNYANWVQQTPGQAFRGLIGGTNKRAPGVPARFSGSILGNKAALTITGAQADDESIYFCALWYSNLWVFGGGTKLTVL

SEQ ID NO: 1252 - protein, 109 aa, Artificial Sequence
  Synthetic Sequence
QAVVTQEPSFSVSPGGTVTLTCRSSTGAVTTSNYANWVQQTPGQAFRGLIGGTNKRAPGVPARFSGSILGNKAALTITGAQADDESDYYCALWYSNLWVFGGGTKLTVL

SEQ ID NO: 1253 - protein, 119 aa, Artificial Sequence
  Synthetic Sequence
QVQLVQSGSELKKPGASVKMSCKASGYTFTRYTMHWVRQAPGKGLEWIGYINPSRGYTNYNQKFKDRATLTTDKSTSTAYMQLSSLRSEDTAVYYCARYYDDHYSLDYWGQGTLVTVSS

SEQ ID NO: 1254 - protein, 106 aa, Artificial Sequence
  Synthetic Sequence
QIVLTQSPATLSLSPGERATMSCSASSSVSYMNWYQQKPGKAPKRWIYDTSKLASGVPSRFRGSGSGTDYTLTISSLQPEDFATYYCQQWSSNPFTFGGGTKVEIK

SEQ ID NO: 1255 - protein, 125 aa, Artificial Sequence
  Synthetic Sequence
ELQLVESGGGVVQPGRSLRLSCAASGFTFSSYGMHWVRQAPGKGLEWVAVISYDGSNKYYADSVKGRFTISRDNSKNTLYLQMNSLRSEDTAVYYCARLSPYCTNGVCWDAFDIWGQGTMVTVSS

SEQ ID NO: 1256 - protein, 122 aa, Artificial Sequence
  Synthetic Sequence
ELQLVESGGGLVKPGRSLRLSCTASGFTFGDYAMSWFRQAPGKGLEWVGFIRSKAYGGTTEYAASVKGRFTISRDDSKSIAYLQMNSLKTEDTAVYYCTPQLWLLQDAFDIWGQGTMVTVSS

SEQ ID NO: 1257 - protein, 120 aa, Artificial Sequence
  Synthetic Sequence
ELQLVESGPGLVKPSGTLSLTCAVSGGSISSRNWWSWVRQPPGKGLEWIGDIYHSGSTNYNPSLKSRVTISVDKSKNQFSLKLSSVTAADTAVYYCASGYTSCRDAFDIWGQGTMVTVSS

SEQ ID NO: 1258 - protein, 126 aa, Artificial Sequence
  Synthetic Sequence
ELQLVEWGAGLLKPSETLSLTCAVYGGSFSGYYWSWIRQPPGKGLEWIGEINHSGSTNYNPSLKSRVTISVDTSKNQFSLKLSSVTAADTAVYYCARGRGRFLGWLLGGSNWFDPWGQGTLVTVSS

SEQ ID NO: 1259 - protein, 119 aa, Artificial Sequence
  Synthetic Sequence
ELQLVEWGAGLLKPSETLSLTCAVYGGSFSGYYWSWIRQPPGKGLEWIGEINHSGSTNYNPSLKSRVTISVDTSKNQFSLKLSSVTAADTAVYYCARGPDRMGHGFDIWGQGTMVTVSS

SEQ ID NO: 1260 - protein, 127 aa, Artificial Sequence
  Synthetic Sequence
ELQLVESGPGLVKPSQTLSLTCAISGDSVSSNSAAWNWIRQSPSRGLEWLGRTYYRSKWYNDYAVSVKSRITINPDTSKNQFSLQLNSVTPEDTAVYYCARDRRRIAARQYYGMDVWGQGTTVTVSS

SEQ ID NO: 1261 - protein, 121 aa, Artificial Sequence
  Synthetic Sequence
ELQLVESGGGLVQPGGSLRLSCAASGFTFSSYAMGWVRQAPGKGLEWVSAVSGSGGSTYYADSVKGRFTISRDNSKNTLYLQMNSLRAEDTAVYYCAKAKFLGHYYGMDVWGQGTTVTVSS

SEQ ID NO: 1262 - protein, 123 aa, Artificial Sequence
  Synthetic Sequence
ELQLVESGPVLVKPTDTLTLTCTVSGFSLNNPRMGVSWIRQPPGKTLEWLAHIFPSDAKAHSASLKSRLTISKDTSKSQVVPTMTNMDPVDTATYYCARILGEYYPPAWFDPWGQGTLVTVSS

SEQ ID NO: 1263 - protein, 107 aa, Artificial Sequence
  Synthetic Sequence
ELQMTQSPSSLSASVGDRVSITCRASQTISNYLNWYQLKPGKAPKLLIYAASTLQSEVPTRFSGSGSGTDFTLTISGLHPEDFATYYCQQFNSYPRTFGQGTKVEIK

SEQ ID NO: 1264 - protein, 107 aa, Artificial Sequence
  Synthetic Sequence
ELQMTQSPSSLSASVGDRVTITCRASQGISNYLAWYQQKPGKVPKLLIYAASTLQSGVPSRFSGSGSGTDFTLTISSLQPEDFATYYCQQSYSTPPTFGQGTKLEIK

SEQ ID NO: 1265 - protein, 107 aa, Artificial Sequence
  Synthetic Sequence
ELVMTQSPSSLSASVGDRVTITCRASQGIGNYLAWYQQKPGQPPKMLIYWASIRESGVPDRFSGSGSGTDFTLTISSLQAEDVAVYYCQQYYSNPQTFGQGTKVEIK

SEQ ID NO: 1266 - protein, 107 aa, Artificial Sequence
  Synthetic Sequence
ELVMTQSPSSLSASVGDRVTITCRASQGISNYLNWYQQKPGKAPKLLIYDASNLETGVPSRFSGSGSGTDFTLTISSLQPEDFATYYCQQSYSTPYTFGQGTKVDIK

SEQ ID NO: 1267 - protein, 107 aa, Artificial Sequence
  Synthetic Sequence
ELQMTQSPSSLSASVGDRVTITCRASQSISSYLNWYQQKSGKAPKLLIYAASSLQSGVPSRFSGSGSGTDFTLTISSLQPEDFATYYCQQSYSSPWTFGQGTKVEIK

SEQ ID NO: 1268 - protein, 108 aa, Artificial Sequence
  Synthetic Sequence
ELVLTQSPGTLSLSPGERATLSCRASQSVSSNYLAWYQQKPGQAPRLLIYGASSRATGIPDRFSGSGSGTDFTLTISSLQPEDVATYYCQKYNSAPLTFGGGTKVEIK

SEQ ID NO: 1269 - protein, 107 aa, Artificial Sequence
  Synthetic Sequence
ELQMTQSPSSLSASVGDRVTITCRASQSISSYLNWYQQKPGKAPKLLIYAASSLQSGVPSRFSGSGSGTEFTLTISSLQPEDFATYYCLQHNAYPYTFGQGTKVEIK

SEQ ID NO: 1270 - protein, 113 aa, Artificial Sequence
  Synthetic Sequence
ELVMTQSPDSLAVSLGERATINCKSSQSVLYSSNNKNYLAWYQQKPGQPPKLLIYWASTRESGVPDRFSGSGSGTDFTLTISSLQAEDVAVYYCQQYLKIPYTFGQGTKVEIK

SEQ ID NO: 1271 - protein, 119 aa, Artificial Sequence
  Synthetic Sequence
QVQLVQSGAEVKKPGASVKVSCKASGYTFTRYTMHWVRQAPGQGLEWMGYINPSRGYTNYNQKFKDRVTMTTDTSISTAYMELSRLRSDDTAVYYCARYYDDHYCLDYWGQGTLVTVSS

SEQ ID NO: 1272 - protein, 119 aa, Artificial Sequence
  Synthetic Sequence
QVQLVQSGAEVKKPGASVKVSCKASGYTFTRYTMHWVRQAPGQGLEWMGYINPSRGYTNYNQKFKDRVTMTTDTSISTAYMELSRLRSDDTAVYYCARYYDDHYSLDYWGQGTLVTVSS

SEQ ID NO: 1273 - protein, 106 aa, Artificial Sequence
  Synthetic Sequence
EIVLTQSPATLSLSPGERATLSCSASSSVSYMNWYQQKPGQAPRLLIYDTSKLASGVPAHFRGSGSGTDYTLTISSLEPEDFAVYYCQQWSSNPFTFGQGTKVEIK

SEQ ID NO: 1274 - protein, 125 aa, Artificial Sequence
  Synthetic Sequence
EVQLVESGGGLVQPGGSLRLSCAASGFTFSTYAMNWVRQAPGKGLEWVGRIRSKYNNYATYYADSVKDRFTISRDDSKNSLYLQMNSLKTEDTAVYYCARHGNFGNSYVSWFAYWGQGTLVTVSS

SEQ ID NO: 1275 - protein, 125 aa, Artificial Sequence; identical to SEQ ID NO: 1274
  Synthetic Sequence

SEQ ID NO: 1276 - protein, 125 aa, Artificial Sequence
  Synthetic Sequence
EVQLVESGGGLVQPGGSLRLSCAASGFTFSTYAMNWVRQAPGKGLEWVGRIRSKYNNYATYYADSVKDRFTISRDDSKNSLYLQMNSLKTEDTAVYYCARHGNFGNSYVSYFAYWGQGTLVTVSS

SEQ ID NO: 1277 - protein, 125 aa, Artificial Sequence
  Synthetic Sequence
EVQLVESGGGLVQPGGSLRLSCAASGFTFSTYAMNWVRQAPGKGLEWVGRIRSKYNNYATYYADSVKDRFTISRDDSKNSLYLQMNSLKTEDTAVYYCARHGNFGNSYVSHFAYWGQGTLVTVSS

SEQ ID NO: 1278 - protein, 110 aa, Artificial Sequence
  Synthetic Sequence
DIQMTQSPSSLSASVGDRVTITCRSSTGAVTTSNYANWVQQKPGKAPKGLIGGTNKRAPGVPSRFSGSLIGDKATLTISSLQPEDFATYYCALWYSNLWVFGQGTKVEIK

SEQ ID NO: 1279 - protein, 110 aa, Artificial Sequence
  Synthetic Sequence
DIQMTQSPSSLSASVGDRVTITCRSSTGAVTTSNYANWVQQKPGKAPKGLIGGTNKRAPGVPARFSGSGSGTDFTLTISSLQPEDFATYYCALWYSNLWVFGQGTKVEIK

SEQ ID NO: 1280 - protein, 110 aa, Artificial Sequence
  Synthetic Sequence
DIQMTQSPSSLSASVGDRVTITCRSSTGAVTTSNYANWVQQKPGKAPKALIGGTNKRAPGVPSRFSGSLIGDKATLTISSLQPEDFATYYCALWYSNLWVFGQGTKVEIK

SEQ ID NO: 1281 - protein, 110 aa, Artificial Sequence; identical to SEQ ID NO: 1278
  Synthetic Sequence

SEQ ID NO: 1282 - skipped

SEQ ID NO: 1283 - protein, 5 aa, Artificial Sequence
  Synthetic Sequence (linker sequence)
GGGGS

SEQ ID NO: 1284 - protein, 10 aa, Artificial Sequence
  Synthetic Sequence (linker sequence)
GGGGSGGGGS

SEQ ID NO: 1285 - protein, 15 aa, Artificial Sequence
  Synthetic Sequence (linker sequence)
GGGGSGGGGSGGGGS

SEQ ID NO: 1286 - protein, 20 aa, Artificial Sequence
  Synthetic Sequence (linker sequence)
GGGGSGGGGSGGGGSGGGGS

SEQ ID NO: 1287 - protein, 25 aa, Artificial Sequence
  Synthetic Sequence (linker sequence)
GGGGSGGGGSGGGGSGGGGSGGGGS

SEQ ID NO: 1288 - protein, 30 aa, Artificial Sequence
  Synthetic Sequence (linker sequence)
GGGGSGGGGSGGGGSGGGGSGGGGSGGGGS

SEQ ID NO: 1289 - protein, 35 aa, Artificial Sequence
  Synthetic Sequence (linker sequence)
GGGGSGGGGSGGGGSGGGGSGGGGSGGGGSGGGGS

SEQ ID NO: 1290 - protein, 40 aa, Artificial Sequence
  Synthetic Sequence (linker sequence)
GGGGSGGGGSGGGGSGGGGSGGGGSGGGGSGGGGSGGGGS

SEQ ID NO: 1291 - protein, 16 aa, Artificial Sequence
  Synthetic Sequence (linker sequence)
GGSGGSGGGGSGGGGS

SEQ ID NO: 1292 - protein, 8 aa, Artificial Sequence
  Synthetic Sequence (linker sequence)
GGGGGGGG

SEQ ID NO: 1293 - protein, 6 aa, Artificial Sequence
  Synthetic Sequence (linker sequence)
GGGGGG

SEQ ID NO: 1294 - protein, 5 aa, Artificial Sequence
  Synthetic Sequence (linker sequence)
EAAAK

SEQ ID NO: 1295 - protein, 10 aa, Artificial Sequence
  Synthetic Sequence (linker sequence)
EAAAKEAAAK

SEQ ID NO: 1296 - protein, 15 aa, Artificial Sequence
  Synthetic Sequence (linker sequence)
EAAAKEAAAKEAAAK

SEQ ID NO: 1297 - protein, 12 aa, Artificial Sequence
  Synthetic Sequence (linker sequence)
AEAAAKEAAAKA

SEQ ID NO: 1298 - protein, 17 aa, Artificial Sequence
  Synthetic Sequence (linker sequence)
AEAAAKEAAAKEAAAKA

SEQ ID NO: 1299 - protein, 22 aa, Artificial Sequence
  Synthetic Sequence (linker sequence)
AEAAAKEAAAKEAAAKEAAAKA

SEQ ID NO: 1300 - protein, 27 aa, Artificial Sequence
  Synthetic Sequence (linker sequence)
AEAAAKEAAAKEAAAKEAAAKEAAAKA

SEQ ID NO: 1301 - protein, 46 aa, Artificial Sequence
  Synthetic Sequence (linker sequence)
AEAAAKEAAAKEAAAKEAAAKALEAEAAAKEAAAKEAAAKEAAAKA

SEQ ID NO: 1302 - protein, 5 aa, Artificial Sequence
  Synthetic Sequence (linker sequence)
PAPAP

SEQ ID NO: 1303 - protein, 18 aa, Artificial Sequence
  Synthetic Sequence (linker sequence)
KESGSVSSEQLAQFRSLD

SEQ ID NO: 1304 - protein, 14 aa, Artificial Sequence
  Synthetic Sequence (linker sequence)
EGKSSGSGSESKST

SEQ ID NO: 1305 - protein, 12 aa, Artificial Sequence
  Synthetic Sequence (linker sequence)
GSAGSAAGSGEF

SEQ ID NO: 1306 - protein, 6 aa, Artificial Sequence
  Synthetic Sequence (linker sequence)
GGSGGS

SEQ ID NO: 1307 - protein, 9 aa, Artificial Sequence
  Synthetic Sequence (linker sequence)
GGSGGSGGS

SEQ ID NO: 1308 - protein, 12 aa, Artificial Sequence
  Synthetic Sequence (linker sequence)
GGSGGSGGSGGS

SEQ ID NO: 1309 - protein, 15 aa, Artificial Sequence
  Synthetic Sequence (linker sequence)
GGSGGSGGSGGSGGS

SEQ ID NO: 1310 - protein, 18 aa, Artificial Sequence
  Synthetic Sequence (linker sequence)
GGSGGSGGSGGSGGSGGS

SEQ ID NO: 1311 - protein, 21 aa, Artificial Sequence
  Synthetic Sequence (linker sequence)
GGSGGSGGSGGSGGSGGSGGS

SEQ ID NO: 1312 - protein, 24 aa, Artificial Sequence
  Synthetic Sequence (linker sequence)
GGSGGSGGSGGSGGSGGSGGSGGS

SEQ ID NO: 1313 - protein, 27 aa, Artificial Sequence
  Synthetic Sequence (linker sequence)
GGSGGSGGSGGSGGSGGSGGSGGSGGS

SEQ ID NO: 1314 - protein, 30 aa, Artificial Sequence
  Synthetic Sequence (linker sequence)
GGSGGSGGSGGSGGSGGSGGSGGSGGSGGS

SEQ ID NO: 1315 - protein, 33 aa, Artificial Sequence
  Synthetic Sequence (linker sequence)
GGSGGSGGSGGSGGSGGSGGSGGSGGSGGSGGS

SEQ ID NO: 1316 - protein, 36 aa, Artificial Sequence
  Synthetic Sequence (linker sequence)
GGSGGSGGSGGSGGSGGSGGSGGSGGSGGSGGSGGS

SEQ ID NO: 1317 - protein, 39 aa, Artificial Sequence
  Synthetic Sequence (linker sequence)
GGSGGSGGSGGSGGSGGSGGSGGSGGSGGSGGSGGSGGS

SEQ ID NO: 1318 - protein, 42 aa, Artificial Sequence
  Synthetic Sequence (linker sequence)
GGSGGSGGSGGSGGSGGSGGSGGSGGSGGSGGSGGSGGSGGS

SEQ ID NO: 1319 - protein, 45 aa, Artificial Sequence
  Synthetic Sequence (linker sequence)
GGSGGSGGSGGSGGSGGSGGSGGSGGSGGSGGSGGSGGSGGSGGS

SEQ ID NO: 1320 - protein, 48 aa, Artificial Sequence
  Synthetic Sequence (linker sequence)
GGSGGSGGSGGSGGSGGSGGSGGSGGSGGSGGSGGSGGSGGSGGSGGS

SEQ ID NO: 1321 - protein, 51 aa, Artificial Sequence
  Synthetic Sequence (linker sequence)
GGSGGSGGSGGSGGSGGSGGSGGSGGSGGSGGSGGSGGSGGSGGSGGSGGS

SEQ ID NO: 1322 - protein, 54 aa, Artificial Sequence
  Synthetic Sequence (linker sequence)
GGSGGSGGSGGSGGSGGSGGSGGSGGSGGSGGSGGSGGSGGSGGSGGSGGSGGS

SEQ ID NO: 1323 - protein, 57 aa, Artificial Sequence
  Synthetic Sequence (linker sequence)
GGSGGSGGSGGSGGSGGSGGSGGSGGSGGSGGSGGSGGSGGSGGSGGSGGSGGSGGS

SEQ ID NO: 1324 - protein, 60 aa, Artificial Sequence
  Synthetic Sequence (linker sequence)
GGSGGSGGSGGSGGSGGSGGSGGSGGSGGSGGSGGSGGSGGSGGSGGSGGSGGSGGSGGS

SEQ ID NO: 1325 - protein, 45 aa, Artificial Sequence
  Synthetic Sequence (linker sequence)
GGGGSGGGGSGGGGSGGGGSGGGGSGGGGSGGGGSGGGGSGGGGS

SEQ ID NO: 1326 - protein, 50 aa, Artificial Sequence
  Synthetic Sequence (linker sequence)
GGGGSGGGGSGGGGSGGGGSGGGGSGGGGSGGGGSGGGGSGGGGSGGGGS

SEQ ID NO: 1327 - protein, 55 aa, Artificial Sequence
  Synthetic Sequence (linker sequence)
GGGGSGGGGSGGGGSGGGGSGGGGSGGGGSGGGGSGGGGSGGGGSGGGGSGGGGS

SEQ ID NO: 1328 - protein, 60 aa, Artificial Sequence
  Synthetic Sequence (linker sequence)
GGGGSGGGGSGGGGSGGGGSGGGGSGGGGSGGGGSGGGGSGGGGSGGGGSGGGGSGGGGS

SEQ ID NO: 1329 - protein, 65 aa, Artificial Sequence
  Synthetic Sequence (linker sequence)
GGGGSGGGGSGGGGSGGGGSGGGGSGGGGSGGGGSGGGGSGGGGSGGGGSGGGGSGGGGSGGGGS

SEQ ID NO: 1330 - protein, 70 aa, Artificial Sequence
  Synthetic Sequence (linker sequence)
GGGGSGGGGSGGGGSGGGGSGGGGSGGGGSGGGGSGGGGSGGGGSGGGGSGGGGSGGGGSGGGGSGGGGS

SEQ ID NO: 1331 - protein, 75 aa, Artificial Sequence
  Synthetic Sequence (linker sequence)
GGGGSGGGGSGGGGSGGGGSGGGGSGGGGSGGGGSGGGGSGGGGSGGGGSGGGGSGGGGSGGGGSGGGGSGGGGS

SEQ ID NO: 1332 - protein, 80 aa, Artificial Sequence
  Synthetic Sequence (linker sequence)
GGGGSGGGGSGGGGSGGGGSGGGGSGGGGSGGGGSGGGGSGGGGSGGGGSGGGGSGGGGSGGGGSGGGGSGGGGSGGGGS

SEQ ID NO: 1333 - protein, 85 aa, Artificial Sequence
  Synthetic Sequence (linker sequence)
GGGGSGGGGSGGGGSGGGGSGGGGSGGGGSGGGGSGGGGSGGGGSGGGGSGGGGSGGGGSGGGGSGGGGSGGGGSGGGGSGGGGS

SEQ ID NO: 1334 - protein, 90 aa, Artificial Sequence
  Synthetic Sequence (linker sequence)
GGGGSGGGGSGGGGSGGGGSGGGGSGGGGSGGGGSGGGGSGGGGSGGGGSGGGGSGGGGSGGGGSGGGGSGGGGSGGGGSGGGGSGGGGS

SEQ ID NO: 1335 - protein, 95 aa, Artificial Sequence
  Synthetic Sequence (linker sequence)
GGGGSGGGGSGGGGSGGGGSGGGGSGGGGSGGGGSGGGGSGGGGSGGGGSGGGGSGGGGSGGGGSGGGGSGGGGSGGGGSGGGGSGGGGSGGGGS

SEQ ID NO: 1336 - protein, 100 aa, Artificial Sequence
  Synthetic Sequence (linker sequence)
GGGGSGGGGSGGGGSGGGGSGGGGSGGGGSGGGGSGGGGSGGGGSGGGGSGGGGSGGGGSGGGGSGGGGSGGGGSGGGGSGGGGSGGGGSGGGGSGGGGS

SEQ ID NO: 1337 - protein, 5 aa, Artificial Sequence
  Synthetic Sequence (linker sequence)
GGGSE

SEQ ID NO: 1338 - protein, 5 aa, Artificial Sequence
  Synthetic Sequence (linker sequence)
GSESG

SEQ ID NO: 1339 - protein, 5 aa, Artificial Sequence
  Synthetic Sequence (linker sequence)
GSEGS

SEQ ID NO: 1340 - protein, 35 aa, Artificial Sequence
  Synthetic Sequence (linker sequence)
GEGGSGEGSSGEGSSSEGGGSEGGGSEGGGSEGGS

SEQ ID NO: 1341 - protein, 4 aa, Artificial Sequence
  Synthetic Sequence
CPPC

SEQ ID NO: 1342 - protein, 9 aa, Artificial Sequence
  Synthetic Sequence
DKTHTCPPC

SEQ ID NO: 1343 - protein, 14 aa, Artificial Sequence
  Synthetic Sequence
EPKSCDKTHTCPPC

SEQ ID NO: 1344 - protein, 14 aa, Artificial Sequence
  Synthetic Sequence
EPKSSDKTHTCPPC

SEQ ID NO: 1345 - skipped

SEQ ID NO: 1346 - protein, 297 aa, Artificial Sequence
  Synthetic Sequence
MTTPRNSVNGTFPAEPMKGPIAMQSGPKPLFRRMSSLVGPTQSFFMRESKTLGAVQIMNGLFHIALGGLLMIPAGIYAPICVTVWYPLWGGIMYIISGSLLAATEKNSRKCLVKGKMIMNSLSLFAAISGMILSIMDILNIKISHFLKMESLNFIRAHTPYINIYNCEPANPSEKNSPSTQYCYSIQSLFLGILSVMLIFAFFQELVIAGIVENEWKRTCSRPKSNIVLLSAEEKKEQTIEIKEEVVGLTETSSQPKNEEDIEIIPIQEEEEEETETNFPEPPQDQESSPIENDSSP

SEQ ID NO: 1347 - protein, 10 aa, Artificial Sequence
  Synthetic Sequence
GRTFSRQSMG

SEQ ID NO: 1348 - protein, 10 aa, Artificial Sequence
  Synthetic Sequence
GRTFSGQSMG

SEQ ID NO: 1349 - protein, 10 aa, Artificial Sequence
  Synthetic Sequence
GRTFSSYAMG

SEQ ID NO: 1350 - protein, 10 aa, Artificial Sequence
  Synthetic Sequence
GRTFSSYNMG

SEQ ID NO: 1351 - protein, 10 aa, Artificial Sequence
  Synthetic Sequence
GRTFSNYNMG

SEQ ID NO: 1352 - protein, 10 aa, Artificial Sequence
  Synthetic Sequence
GRTFSNSNMG

SEQ ID NO: 1353 - protein, 10 aa, Artificial Sequence
  Synthetic Sequence
GRSFSSVNMG

SEQ ID NO: 1354 - protein, 7 aa, Artificial Sequence
  Synthetic Sequence
GRTFSMG

SEQ ID NO: 1355 - protein, 10 aa, Artificial Sequence
  Synthetic Sequence
GRTVGSYSMG

SEQ ID NO: 1356 - protein, 10 aa, Artificial Sequence
  Synthetic Sequence
RFTLDYYAIG

SEQ ID NO: 1357 - protein, 10 aa, Artificial Sequence
  Synthetic Sequence
GFTLDYYAIG

SEQ ID NO: 1358 - protein, 10 aa, Artificial Sequence
  Synthetic Sequence
GRDFATYSMA

SEQ ID NO: 1359 - protein, 10 aa, Artificial Sequence
  Synthetic Sequence
GRDFATYSMT

SEQ ID NO: 1360 - protein, 10 aa, Artificial Sequence
  Synthetic Sequence
GRDFSTYSMG

SEQ ID NO: 1361 - protein, 10 aa, Artificial Sequence
  Synthetic Sequence
GRTFNTYSMG

SEQ ID NO: 1362 - protein, 10 aa, Artificial Sequence
  Synthetic Sequence
GRTFSTYSMG

SEQ ID NO: 1363 - protein, 10 aa, Artificial Sequence
  Synthetic Sequence
GRDFSTYSMG

SEQ ID NO: 1364 - protein, 10 aa, Artificial Sequence
  Synthetic Sequence
GNTFDTRAMG

SEQ ID NO: 1365 - protein, 10 aa, Artificial Sequence
  Synthetic Sequence
GRTRDANAMG

SEQ ID NO: 1366 - protein, 10 aa, Artificial Sequence
  Synthetic Sequence
GSTFSIKAMG

SEQ ID NO: 1367 - protein, 17 aa, Artificial Sequence
  Synthetic Sequence
VITWSGGSPYYADSVRG

SEQ ID NO: 1368 - protein, 17 aa, Artificial Sequence
  Synthetic Sequence
VITWSGGSPYYADSVKG

SEQ ID NO: 1369 - protein, 17 aa, Artificial Sequence
  Synthetic Sequence
VISWSGGSPYYADSVKG

SEQ ID NO: 1370 - protein, 17 aa, Artificial Sequence
  Synthetic Sequence
AIDWSGGSPYYAASVRG

SEQ ID NO: 1371 - protein, 17 aa, Artificial Sequence
  Synthetic Sequence
VIDWSGGSPYYTDSVRG

SEQ ID NO: 1372 - protein, 17 aa, Artificial Sequence
  Synthetic Sequence
AITYSGGSPYYASSVRG

SEQ ID NO: 1373 - protein, 17 aa, Artificial Sequence
  Synthetic Sequence
AVIWSGASPYYADSVKG

SEQ ID NO: 1374 - protein, 17 aa, Artificial Sequence
  Synthetic Sequence
AVTWSGASPYYADSVKG

SEQ ID NO: 1375 - protein, 17 aa, Artificial Sequence
  Synthetic Sequence
AVTRSGASPYYADSVKG

SEQ ID NO: 1376 - protein, 17 aa, Artificial Sequence
  Synthetic Sequence
CISSSGGSTNYADSVKG

SEQ ID NO: 1377 - protein, 17 aa, Artificial Sequence
  Synthetic Sequence
TISWSGQRTRYADSVKG

SEQ ID NO: 1378 - protein, 17 aa, Artificial Sequence
  Synthetic Sequence
SISWSGQRSRYADSVKG

SEQ ID NO: 1379 - protein, 17 aa, Artificial Sequence
  Synthetic Sequence
IISWSGQRTRYADSVKG

SEQ ID NO: 1380 - protein, 17 aa, Artificial Sequence
  Synthetic Sequence
AISRSSFNTYYSDSVTG

SEQ ID NO: 1381 - protein, 17 aa, Artificial Sequence
  Synthetic Sequence
AISWSGSRTYYADSVKG

SEQ ID NO: 1382 - protein, 17 aa, Artificial Sequence
  Synthetic Sequence
AFISGRGSTKYADSVKG

SEQ ID NO: 1383 - protein, 17 aa, Artificial Sequence
  Synthetic Sequence
GFISGRGSAKYADSVKG

SEQ ID NO: 1384 - protein, 12 aa, Artificial Sequence
  Synthetic Sequence
PVSYGSQWLADY

SEQ ID NO: 1385 - protein, 12 aa, Artificial Sequence
  Synthetic Sequence
PVSYGSSWLADY

SEQ ID NO: 1386 - protein, 12 aa, Artificial Sequence
  Synthetic Sequence
PLSYGSTWLADY

SEQ ID NO: 1387 - protein, 12 aa, Artificial Sequence
  Synthetic Sequence
GVSFGSRWLSDY

SEQ ID NO: 1388 - protein, 12 aa, Artificial Sequence
  Synthetic Sequence
GVSYGSRWLGDY

SEQ ID NO: 1389 - protein, 12 aa, Artificial Sequence
  Synthetic Sequence
NPTYGSDWNAEN

SEQ ID NO: 1390 - protein, 12 aa, Artificial Sequence
  Synthetic Sequence
NPTYSGGWHAEY

SEQ ID NO: 1391 - protein, 20 aa, Artificial Sequence
  Synthetic Sequence
ERTWVSNYYCSGDGDGYDYD

SEQ ID NO: 1392 - protein, 14 aa, Artificial Sequence
  Synthetic Sequence
PRTWGEFPPTQYDS

SEQ ID NO: 1393 - protein, 13 aa, Artificial Sequence
  Synthetic Sequence
GKYGMKWRDGADY

SEQ ID NO: 1394 - protein, 13 aa, Artificial Sequence
  Synthetic Sequence
DRSIEVQIADYDY

SEQ ID NO: 1395 - protein, 12 aa, Artificial Sequence
  Synthetic Sequence
VLPTGGGSAMDY

SEQ ID NO: 1396 - protein, 12 aa, Artificial Sequence
  Synthetic Sequence
VLTTGGGSAMDY

SEQ ID NO: 1397 - protein, 140 aa, Artificial Sequence
  Synthetic Sequence
QVQLQESGGGLVQAGGSLRLSCAASGRTFSRQSMGWFRQAPGKEREFVAVITWSGGSPYYADSVRGRFTISRDNAKNTVYLQMNSLKPEDTAVYYCAAPVSYGSQWLADYWGQGTQVTVSSAAAYPYDVPDYGSHHHHHH

SEQ ID NO: 1398 - protein, 140 aa, Artificial Sequence
  Synthetic Sequence
QVQLQESGGGLVQAGDSLRLSCAASGRTFSRQSMGWFRQAPGKEREFVAVITWSGGSPYYADSVKGRFTISRDNAKNTVYLQMNSLKPEDTAVYYCAAPVSYGSQWLADYWGQGTQVTVSSAAAYPYDVPDYGSHHHHHH

SEQ ID NO: 1399 - protein, 140 aa, Artificial Sequence
  Synthetic Sequence
QVQLQESGGGLVQAGGSLRLSCAASGRTFSGQSMGWFRQAPGKEREFVAVITWSGGSPYYADSVRGRFTISRDNAKNTVHLQMNSLKPEDTAVYYCAAPVSYGSQWLADYWGQGTQVTVSSAAAYPYDVPDYGSHHHHHH

SEQ ID NO: 1400 - protein, 140 aa, Artificial Sequence
  Synthetic Sequence
QVQLQESGGGLVQAGGSLRLSCAASGRTFSSYAMGWFRQAPGKEREFVAVITWSGGSPYYADSVRGRFTISRDNAKNTVYLQMNSLKPEDTAVYYCAAPVSYGSQWLADYWGQGTQVTVSSAAAYPYDVPDYGSHHHHHH

SEQ ID NO: 1401 - protein, 140 aa, Artificial Sequence
  Synthetic Sequence
QVQLQESGGGLVQAGGSLRLSCAASGRTFSRQSMGWFRQAPGEEREFVAVITWSGGSPYYADSVRGRFTISRDNAKNTVYLQMNSLKPEDTAVYYCAAPVSYGSQWLADYWGQGTQVTVSSAAAYPYDVPDYGSHHHHHH

SEQ ID NO: 1402 - protein, 140 aa, Artificial Sequence
  Synthetic Sequence
QVQLQESGGGLVQAGGSLRLSCAASGRTFSSYNMGWFRQAPGKEREFVAVISWSGGSPYYADSVKGRFTISRDNAKNTVYLQMNSLKPEDTAVYYCAAPVSYGSSWLADYWGQGTQVTVSSAAAYPYDVPDYGSHHHHHH

SEQ ID NO: 1403 - protein, 140 aa, Artificial Sequence
  Synthetic Sequence
QVQLQESGGGLVQAGGSLRLSCAASGRTFSNYNMGWFRQAPGKEREFVAAIDWSGGSPYYAASVRGRFTISRDNAENTVYLQMNSLKPEDTAVYYCAAPLSYGSTWLADYWGQGTQVTVSSAAAYPYDVPDYGSHHHHHH

SEQ ID NO: 1404 - protein, 140 aa, Artificial Sequence
  Synthetic Sequence
QVQLQESGGGLVQAGGSLRLSCAASGRTFSNSNMGWFRQAPGKEREFVAVIDWSGGSPYYTDSVRGRFTISRDNAKNTVYLQMNRLKPEDTAVYYCAGGVSFGSRWLSDYWGQGTQVTVSSAAAYPYDVPDYGSHHHHHH

SEQ ID NO: 1405 - protein, 140 aa, Artificial Sequence
  Synthetic Sequence
QVQLQESGGGLVQAGGSLRLSCAASGRSFSSVNMGWFRQAPGKEREFVAVIDWSGGSPYYTDSVRGRFTISRDNSKNTVYLQMNSLKPEDTAVYYCAAGVSYGSRWLGDYWGQGTQVTVSSAAAYPYDVPDYGSHHHHHH

SEQ ID NO: 1406 - protein, 137 aa, Artificial Sequence
  Synthetic Sequence
QVQLQESGGGLAQAGGSLRLSCAASGRTFSMGWFRQAPGKEREFVAAITYSGGSPYYASSVRGRFTISRDNAKNTVYLQMNSLKPEDTAVYYCAANPTYGSDWNAENWGQGTQVTVSSAAAYPYDVPDYGSHHHHHH

SEQ ID NO: 1407 - protein, 137 aa, Artificial Sequence
  Synthetic Sequence
QVQLQESGGGLVQPGGSLRLSCAASGRTFSMGWFRQAPGKEREFVAAITYSGGSPYYASSVRGRFTISRDNAKNTVYLQMNSLKPEDTAVYYCAANPTYGSDWNAENWGQGTQVTVSSAAAYPYDVPDYGSHHHHHH

SEQ ID NO: 1408 - protein, 140 aa, Artificial Sequence
  Synthetic Sequence
QVQLQESGGGLVQAGGSLRLSCAASGRTVGSYSMGWFRQAPGKEREFVAAVIWSGASPYYADSVKGRFTISRDNAKNTVYLQMNSLKPEDTAVYYCAANPTYSGGWHAEYWGQGTQVTVSSAAAYPYDVPDYGSHHHHHH

SEQ ID NO: 1409 - protein, 140 aa, Artificial Sequence
  Synthetic Sequence
QVQLQESGGGLVQAGGSLRLSCAASGRTVGSYSMGWFRQAPGKEREFVAAVTWSGASPYYADSVKGRFTISRDNAKNTVYLQMNSLKPEDTAVYYCAANPTYSGGWHAEYWGQGTQVTVSSAAAYPYDVPDYGSHHHHHH

SEQ ID NO: 1410 - protein, 140 aa, Artificial Sequence
  Synthetic Sequence
QVQLQESGGGLVQAGDSLRLSCAASGRTVGSYSMGWFRQAPGKEREFVAAVTWSGASPYYADSVKGRFTISRDNAKNTVYLQMNSLKPEDTAVYYCAANPTYSGGWHAEYWGQGTQVTVSSAAAYPYDVPDYGSHHHHHH

SEQ ID NO: 1411 - protein, 140 aa, Artificial Sequence
  Synthetic Sequence
QVQLQESGGGSEQPGGSLRLSCAASGRTVGSYSMGWFRQAPGKEREFVAAVTRSGASPYYADSVKGRFTISRDNAKNTVYLQMNSLKPEDTAVYYCAANPTYSGGWHAEYWGQGTQVTVSSAAAYPYDVPDYGSHHHHHH

SEQ ID NO: 1412 - protein, 140 aa, Artificial Sequence
  Synthetic Sequence
QVQLQESGGGLVQPGGSLRLSCAASRFTLDYYAIGWFRQAPGKEREFVAAVTWSGASPYYADSVKGRFTISRDNAKNTVYLQMNSLKPEDTAVYYCAANPTYSGGWHAEYWGQGTQVTVSSAAAYPYDVPDYGSHHHHHH

SEQ ID NO: 1413 - protein, 149 aa, Artificial Sequence
  Synthetic Sequence
QVQLQESGGGLVQPGGSLRLSCTASGFTLDYYAIGWLRQAPGKEREGVSCISSSGGSTNYADSVKGRFTISRDNAKNTVYLLMNSLKPEDTAVYYCAAERTWVSNYYCSGDGDGYDYDYWGQGTQVTVSSAAAYPYDVPDYGSHHHHHH

SEQ ID NO: 1414 - protein, 142 aa, Artificial Sequence
  Synthetic Sequence
QVQLQESGGGLVQAGGSLRLSCAASGRDFATYSMAWFRQAPGKERESVATISWSGQRTRYADSVKGRFTISRDNAKNTVYLQMNSLKPEDTAVYYCAMPRTWGEFPPTQYDSWGQGTQVTVSSAAAYPYDVPDYGSHHHHHH

SEQ ID NO: 1415 - protein, 142 aa, Artificial Sequence
  Synthetic Sequence
QVQLQESGGGLVQAGGSLRLSCAASGRDFATYSMAWFRQAPGKERESVATISWSGQRTRYADSVKGRFTISRDNAKNTVYLQMNSLKPEDTAVYYCAAPRTWGEFPPTQYDSWGQGTQVTVSSAAAYPYDVPDYGSHHHHHH

SEQ ID NO: 1416 - protein, 142 aa, Artificial Sequence
  Synthetic Sequence
QVQLQESGGGLVPAGGSLRLSCAASGRDFATYSMAWFRQAPGKERESVATISWSGQRTRYADSVKGRFTISRDNAKNTVYLQMNSLKPEDTAVYYCAAPRTWGEFPPTQYDSWGQGTQVTVSSAAAYPYDVPDYGSHHHHHH

SEQ ID NO: 1417 - protein, 142 aa, Artificial Sequence
  Synthetic Sequence
QVQLQESGGGLVQAGDSLRLSCAASGRDFATYSMAWFRQAPGKERESVATISWSGQRTRYADSVKGRFTISRDNAKNTVYLQMNSLKPEDTAVYYCAAPRTWGEFPPTQYDSWGQGTQVTVSSAAAYPYDVPDYGSHHHHHH

SEQ ID NO: 1418 - protein, 142 aa, Artificial Sequence
  Synthetic Sequence
QVQLQESGGGLVQAGGSLRLSCAASGRDFATYSMAWFRQAPGEERESVATISWSGQRTRYADSVKGRFTISRDNAKNTVYLQMNSLKPEDTAVYYCAAPRTWGEFPPTQYDSWGQGTQVTVSSAAAYPYDVPDYGSHHHHHH

SEQ ID NO: 1419 - protein, 142 aa, Artificial Sequence
  Synthetic Sequence
QVQLQESGGGLVQPGGSLRLSCAASGRDFATYSMAWFRQAPGKERESVATISWSGQRTRYADSVKGRFTISRDNAKNTVYLQMNSLKPEDTAVYYCAAPRTWGEFPPTQYDSWGQGTQVTVSSAAAYPYDVPDYGSHHHHHH

SEQ ID NO: 1420 - protein, 142 aa, Artificial Sequence
  Synthetic Sequence
QVQLQESGGGLVQPGGSLRLSCATSGRDFATYSMAWFRQAPGKERESVATISWSGQRTRYADSVKGRFTISRDNAKNTVYLQMNSLKPEDTAVYYCAAPRTWGEFPPTQYDSWGQGTQVTVSSAAAYPYDVPDYGSHHHHHH

SEQ ID NO: 1421 - protein, 142 aa, Artificial Sequence
  Synthetic Sequence
QVQLQESGGGLVQAGGSLRLSCAASGRDFATYSMTWFRQAPGKERESVATISWSGQRTRYADSVKGRFTISRDNAKNTVYLQMNSLRPEDTAVYYCAAPRTWGEFPPTQYDSWGQGTQVTVSSAAAYPYDVPDYGSHHHHHH

SEQ ID NO: 1422 - protein, 142 aa, Artificial Sequence
  Synthetic Sequence
QVQLQESGGGLVQAGDSLRLSCAASGRDFSTYSMGWFRQAPGKERESVATISWSGQRTRYADSVKGRFTISRDNAKNTVYLQMNSLKPEDTAVYYCAAPRTWGEFPPTQYDSWGQGTQVTVSSAAAYPYDVPDYGSHHHHHH

SEQ ID NO: 1423 - protein, 142 aa, Artificial Sequence
  Synthetic Sequence
QVQLQESGGGLVQAGGSLRLSCVASGRTFNTYSMGWFRQAPGKEREFVASISWSGQRSRYADSVKGRFTISRDNAKNTVYLQMNSLKPEDTAVYYCASPRTWGEFPPTQYDSWGQGTQVTVSSAAAYPYDVPDYGSHHHHHH

SEQ ID NO: 1424 - protein, 142 aa, Artificial Sequence
  Synthetic Sequence
QVQLQESGGGLVQAGGSLRLSCAASGRTFSTYSMGWFRQAPGKEREFVAIISWSGQRTRYADSVKGRFTISRDNAKNTVYLQMNSLKPEDTAVYYCAAPRTWGEFPPTQYDSWGQGTQVTVSSAAAYPYDVPDYGSHHHHHH

SEQ ID NO: 1425 - protein, 142 aa, Artificial Sequence
  Synthetic Sequence
QVQLQESGGGSVQTGGSLRLSCAASGRDFSTYSMGWFRQAPGKERESVATISWSGQRTRYADSVKGRFTISRDNAKNTVYLQMNSLKPEDTAVYYCAAPRTWGEFPPTQYDSWGQGTQVTVSSAAAYPYDVPDYGSHHHHHH

SEQ ID NO: 1426 - protein, 141 aa, Artificial Sequence
  Synthetic Sequence
QVQLQESGGGLAQAGNSLRISCVASGNTFDTRAMGWFRQAPGKEREFVAAISRSSFNTYYSDSVTGRFTISRDNAKNTVYLQMNSLKPEDTAVYYCAAGKYGMKWRDGADYWGQGTQVTVSSAAAYPYDVPDYGSHHHHHH

SEQ ID NO: 1427 - protein, 141 aa, Artificial Sequence
  Synthetic Sequence
QVQLQESGGGLAQAGNSLRISCVASGNTFDTRAMGWFRQAPGKEREFVAAISRSSFNTYYSDSVTGRFTISRDNAKNTVYLQMNSLKPEDTAVYYCVAGKYGMKWRDGADYWGQGTQVTVSSAAAYPYDVPDYGSHHHHHH

SEQ ID NO: 1428 - protein, 141 aa, Artificial Sequence
  Synthetic Sequence
QVQLQESGGGLVQAGESLRISCVASGNTFDTRAMGWFRQAPGKEREFVAAISRSSFNTYYSDSVTGRFTISRDNAKNTVYLQMNSLKPEDTAVYYCVAGKYGMKWRDGADYWGQGTQVTVSSAAAYPYDVPDYGSHHHHHH

SEQ ID NO: 1429 - protein, 141 aa, Artificial Sequence
  Synthetic Sequence
QVQLQESGGGLAQEGGSLRLSCVASGNTFDTRAMGWFRQAPGKEREFVAAISRSSFNTYYSDSVTGRFTISRDNAKNMVYLQMNSLKPEDTAVYYCAAGKYGMKWRDGADYWGQGTQVTVSSAAAYPYDVPDYGSHHHHHH

SEQ ID NO: 1430 - protein, 141 aa, Artificial Sequence
  Synthetic Sequence
QVQLQESGGGLVQTGGSLRLSCAASGNTFDTRAMGWFRQAPGKEREFVAAISRSSFNTYYSDSVTGRFTISRDNAKNTVYLQMNSLKPEDTAVYYCAAGKYGMKWRDGADYWGQGTQVTVSSAAAYPYDVPDYGSHHHHHH

SEQ ID NO: 1431 - protein, 141 aa, Artificial Sequence
  Synthetic Sequence
QVQLQESGGGSVQTGGTLTLSCVASGNTFDTRAMGWFRQAPGEEREFVAAISRSSFNTYYSDSVTGRFTISRDNAKNTVYLQMNSLKPEDTAVYYCAAGKYGMKWRDGADYWGQGTQVTVSSAAAYPYDVPDYGSHHHHHH

SEQ ID NO: 1432 - protein, 141 aa, Artificial Sequence
  Synthetic Sequence
QVQLQESGGGLVQAEGSLRLSCAASGRTRDANAMGWFRQAPGKERELVAAISWSGSRTYYADSVKGRFTISRDNVMHTVYLSMNSLKPEDTAVYYCAADRSIEVQIADYDYWGRGTQVTVSSAAAYPYDVPDYGSHHHHHH

SEQ ID NO: 1433 - protein, 140 aa, Artificial Sequence
  Synthetic Sequence
QVQLQESGGGSVQAGGSLRLSCAASGSTFSIKAMGWYRQAPGKQRELVAAFISGRGSTKYADSVKGRFAISRDNAKNTMYLQMDSLEPEDTAVYYCYIVLPTGGGSAMDYWGEGTQVTVSSAAAYPYDVPDYGSHHHHHH

SEQ ID NO: 1434 - protein, 140 aa, Artificial Sequence
  Synthetic Sequence
QVQLQESGGGVVQAGGSLRLSCAASGSTFSIKAMGWYRQAPGKQRDLVAGFISGRGSAKYADSVKGRFAISRDNAKNTMYLQMDSLKPEDTAVYYCYIVLTTGGGSAMDYWGQGTQVTVSSAAAYPYDVPDYGSHHHHHH

SEQ ID NO: 1435 - protein, 647 aa, Mus musculus
  MISC_FEATURE: pcDNA3.4-mouse light chain kappa-hIgG1-LALA-PG-20*GGS-3LEC89-20*GGS+G-IFNa2_R149A
  MISC_FEATURE: P-956: pcDNA3.4-mouse light chain kappa-hIgG1-LALA-PG-20*GGS-3LEC89-20*GGS+G-IFNa2_R149A
MKLPVRLLVLMFWIPASSSDKTHTCPPCPAPEAAGGPSVFLFPPKPKDTLMISRTPEVTCVVVDVSHEDPEVKFNWYVDGVEVHNAKTKPREEQYNSTYRVVSVLTVLHQDWLNGKEYKCKVSNKALGAPIEKTISKAKGQPREPQVYTLPPSRDELTKNQVSLTCLVKGFYPSDIAVEWESNGQPENNYKTTPPVLDSDGSFFLYSKLTVDKSRWQQGNVFSCSVMHEALHNHYTQKSLSLSPGKGGSGGSGGSGGSGGSGGSGGSGGSGGSGGSGGSGGSGGSGGSGGSGGSGGSGGSGGSGGSQVQLQESGGGLVQPGGSLRLSCAASGRIFSVNAMGWYRQAPGKQRELVAAITNQGAPTYADSVKGRFTISRDNAGNTVYLQMNSLRPEDTAVYYCKAFTRGDDYWGQGTQVTVSSGGSGGSGGSGGSGGSGGSGGSGGSGGSGGSGGSGGSGGSGGSGGSGGSGGSGGSGGSGGSGCDLPQTHSLGSRRTLMLLAQMRKISLFSCLKDRHDFGFPQEEFGNQFQKAETIPVLHEMIQQIFNLFSTKDSSAAWDETLLDKFYTELYQQLNDLEACVIQGVGVTETPLMKEDSILAVRKYFQRITLYLKEKKYSPCAWEVVRAEIMASFSLSTNLQESLRSKE

SEQ ID NO: 1436 - protein, 647 aa, Mus musculus
  MISC_FEATURE: P-957: pcDNA3.4-mouse Ig heavy chain-3LEC89-20*GGS-hIgG1-LALA-PG-20*GGS+G-IFNa2_R149A
MGWSCIIFFLVATATGVHSQVQLQESGGGLVQPGGSLRLSCAASGRIFSVNAMGWYRQAPGKQRELVAAITNQGAPTYADSVKGRFTISRDNAGNTVYLQMNSLRPEDTAVYYCKAFTRGDDYWGQGTQVTVSSGGSGGSGGSGGSGGSGGSGGSGGSGGSGGSGGSGGSGGSGGSGGSGGSGGSGGSGGSGGSDKTHTCPPCPAPEAAGGPSVFLFPPKPKDTLMISRTPEVTCVVVDVSHEDPEVKFNWYVDGVEVHNAKTKPREEQYNSTYRVVSVLTVLHQDWLNGKEYKCKVSNKALGAPIEKTISKAKGQPREPQVYTLPPSRDELTKNQVSLTCLVKGFYPSDIAVEWESNGQPENNYKTTPPVLDSDGSFFLYSKLTVDKSRWQQGNVFSCSVMHEALHNHYTQKSLSLSPGKGGSGGSGGSGGSGGSGGSGGSGGSGGSGGSGGSGGSGGSGGSGGSGGSGGSGGSGGSGGSGCDLPQTHSLGSRRTLMLLAQMRKISLFSCLKDRHDFGFPQEEFGNQFQKAETIPVLHEMIQQIFNLFSTKDSSAAWDETLLDKFYTELYQQLNDLEACVIQGVGVTETPLMKEDSILAVRKYFQRITLYLKEKKYSPCAWEVVRAEIMASFSLSTNLQESLRSKE

SEQ ID NO: 1437 - protein, 421 aa, Mus musculus
  MISC_FEATURE: P-958: pcDNA3.4-mouse Ig heavy chain-3LEC89-20*GGS-hIgG1-LALA-PG-YT (hole)
MGWSCIIFFLVATATGVHSQVQLQESGGGLVQPGGSLRLSCAASGRIFSVNAMGWYRQAPGKQRELVAAITNQGAPTYADSVKGRFTISRDNAGNTVYLQMNSLRPEDTAVYYCKAFTRGDDYWGQGTQVTVSSGGSGGSGGSGGSGGSGGSGGSGGSGGSGGSGGSGGSGGSGGSGGSGGSGGSGGSGGSGGSDKTHTCPPCPAPEAAGGPSVFLFPPKPKDTLMISRTPEVTCVVVDVSHEDPEVKFNWYVDGVEVHNAKTKPREEQYNSTYRVVSVLTVLHQDWLNGKEYKCKVSNKALGAPIEKTISKAKGQPREPQVYTLPPSRDELTKNQVSLTCLVKGFYPSDIAVEWESNGQPENNYKTTPPVLDSDGSFFLTSKLTVDKSRWQQGNVFSCSVMHEALHNHYTQKSLSLSPGK

SEQ ID NO: 1438 - protein, 472 aa, Mus musculus
  MISC_FEATURE: P-959: pcDNA3.4-mouse light chain kappa-hIgG1-LALA-PG-TY (knob)-20*GGS+G-IFNa2_R149A
MKLPVRLLVLMFWIPASSSDKTHTCPPCPAPEAAGGPSVFLFPPKPKDTLMISRTPEVTCVVVDVSHEDPEVKFNWYVDGVEVHNAKTKPREEQYNSTYRVVSVLTVLHQDWLNGKEYKCKVSNKALGAPIEKTISKAKGQPREPQVYTLPPSRDELTKNQVSLYCLVKGFYPSDIAVEWESNGQPENNYKTTPPVLDSDGSFFLYSKLTVDKSRWQQGNVFSCSVMHEALHNHYTQKSLSLSPGKGGSGGSGGSGGSGGSGGSGGSGGSGGSGGSGGSGGSGGSGGSGGSGGSGGSGGSGGSGGSGCDLPQTHSLGSRRTLMLLAQMRKISLFSCLKDRHDFGFPQEEFGNQFQKAETIPVLHEMIQQIFNLFSTKDSSAAWDETLLDKFYTELYQQLNDLEACVIQGVGVTETPLMKEDSILAVRKYFQRITLYLKEKKYSPCAWEVVRAEIMASFSLSTNLQESLRSKE

SEQ ID NO: 1439 - protein, 647 aa, Mus musculus
  MISC_FEATURE: P-960: pcDNA3.4-mouse light chain kappa-hIgG1-LALA-PG-YT (hole)-20*GGS-3LEC89-20*GGS+G-IFNa2_R149A
MKLPVRLLVLMFWIPASSSDKTHTCPPCPAPEAAGGPSVFLFPPKPKDTLMISRTPEVTCVVVDVSHEDPEVKFNWYVDGVEVHNAKTKPREEQYNSTYRVVSVLTVLHQDWLNGKEYKCKVSNKALGAPIEKTISKAKGQPREPQVYTLPPSRDELTKNQVSLTCLVKGFYPSDIAVEWESNGQPENNYKTTPPVLDSDGSFFLTSKLTVDKSRWQQGNVFSCSVMHEALHNHYTQKSLSLSPGKGGSGGSGGSGGSGGSGGSGGSGGSGGSGGSGGSGGSGGSGGSGGSGGSGGSGGSGGSGGSQVQLQESGGGLVQPGGSLRLSCAASGRIFSVNAMGWYRQAPGKQRELVAAITNQGAPTYADSVKGRFTISRDNAGNTVYLQMNSLRPEDTAVYYCKAFTRGDDYWGQGTQVTVSSGGSGGSGGSGGSGGSGGSGGSGGSGGSGGSGGSGGSGGSGGSGGSGGSGGSGGSGGSGGSGCDLPQTHSLGSRRTLMLLAQMRKISLFSCLKDRHDFGFPQEEFGNQFQKAETIPVLHEMIQQIFNLFSTKDSSAAWDETLLDKFYTELYQQLNDLEACVIQGVGVTETPLMKEDSILAVRKYFQRITLYLKEKKYSPCAWEVVRAEIMASFSLSTNLQESLRSKE

SEQ ID NO: 1440 - protein, 647 aa, Mus musculus
  MISC_FEATURE: P-961: pcDNA3.4-mouse Ig heavy chain-3LEC89-20*GGS-hIgG1-LALA-PG-YT (hole)-20*GGS+G-IFNa2_R149A
MGWSCIIFFLVATATGVHSQVQLQESGGGLVQPGGSLRLSCAASGRIFSVNAMGWYRQAPGKQRELVAAITNQGAPTYADSVKGRFTISRDNAGNTVYLQMNSLRPEDTAVYYCKAFTRGDDYWGQGTQVTVSSGGSGGSGGSGGSGGSGGSGGSGGSGGSGGSGGSGGSGGSGGSGGSGGSGGSGGSGGSGGSDKTHTCPPCPAPEAAGGPSVFLFPPKPKDTLMISRTPEVTCVVVDVSHEDPEVKFNWYVDGVEVHNAKTKPREEQYNSTYRVVSVLTVLHQDWLNGKEYKCKVSNKALGAPIEKTISKAKGQPREPQVYTLPPSRDELTKNQVSLTCLVKGFYPSDIAVEWESNGQPENNYKTTPPVLDSDGSFFLTSKLTVDKSRWQQGNVFSCSVMHEALHNHYTQKSLSLSPGKGGSGGSGGSGGSGGSGGSGGSGGSGGSGGSGGSGGSGGSGGSGGSGGSGGSGGSGGSGGSGCDLPQTHSLGSRRTLMLLAQMRKISLFSCLKDRHDFGFPQEEFGNQFQKAETIPVLHEMIQQIFNLFSTKDSSAAWDETLLDKFYTELYQQLNDLEACVIQGVGVTETPLMKEDSILAVRKYFQRITLYLKEKKYSPCAWEVVRAEIMASFSLSTNLQESLRSKE

SEQ ID NO: 1441 - protein, 246 aa, Mus musculus
  MISC_FEATURE: P-962: pcDNA3.4-mouse light chain kappa-hIgG1-LALA-PG-TY (knob)
MKLPVRLLVLMFWIPASSSDKTHTCPPCPAPEAAGGPSVFLFPPKPKDTLMISRTPEVTCVVVDVSHEDPEVKFNWYVDGVEVHNAKTKPREEQYNSTYRVVSVLTVLHQDWLNGKEYKCKVSNKALGAPIEKTISKAKGQPREPQVYTLPPSRDELTKNQVSLYCLVKGFYPSDIAVEWESNGQPENNYKTTPPVLDSDGSFFLYSKLTVDKSRWQQGNVFSCSVMHEALHNHYTQKSLSLSPGK

SEQ ID NO: 1442 - protein, 357 aa, Artificial Sequence
  Synthetic Sequence
DVQLVESGGGLVQPGGSLRLSCAASGSFSSINVMGWYRQAPGKERELVARITNLGLPNYADSVKGRFTISRDNSKNTVYLQMNSLRPEDTAVYYCYLVALKAEYWGQGTLVTVSSGGSGGSGGSGGSGGSDKTHTCPPCPAPEAAGGPSVFLFPPKPKDTLMISRTPEVTCVVVDVSHEDPEVKFNWYVDGVEVHNAKTKPREEQYNSTYRVVSVLTVLHQDWLNGKEYKCKVSNKALGAPIEKTISKAKGQPREPQVYTLPPSRDELTKNQVSLTCLVKGFYPSDIAVEWESNGQPENNYKTTPPVLDSDGSFFLTSKLTVDKSRWQQGNVFSCSVMHEALHNHYTQKSLSLSPGK

SEQ ID NO: 1443 - protein, 351 aa, Artificial Sequence
  Synthetic Sequence
DVQLVESGGGLVQPGGSLRLSCAASGSFSSINVMGWYRQAPGKERELVARITNLGLPNYADSVKGRFTISRDNSKNTVYLQMNSLRPEDTAVYYCYLVALKAEYWGQGTLVTVSSGGSGGSGGSDKTHTCPPCPAPEAAGGPSVFLFPPKPKDTLMISRTPEVTCVVVDVSHEDPEVKFNWYVDGVEVHNAKTKPREEQYNSTYRVVSVLTVLHQDWLNGKEYKCKVSNKALGAPIEKTISKAKGQPREPQVYTLPPSRDELTKNQVSLTCLVKGFYPSDIAVEWESNGQPENNYKTTPPVLDSDGSFFLTSKLTVDKSRWQQGNVFSCSVMHEALHNHYTQKSLSLSPGK

SEQ ID NO: 1444 - protein, 357 aa, Artificial Sequence
  Synthetic Sequence
DVQLVESGGGLVQPGGSLRLSCAASGRIFSVNAMGWYRQAPGKQRELVAAITNQGAPTYADSVKGRFTISRDNSKNTVYLQMNSLRPEDTAVYYCKAFTRGDDYWGQGTLVTVSSGGSGGSGGSGGSGGSDKTHTCPPCPAPEAAGGPSVFLFPPKPKDTLMISRTPEVTCVVVDVSHEDPEVKFNWYVDGVEVHNAKTKPREEQYNSTYRVVSVLTVLHQDWLNGKEYKCKVSNKALGAPIEKTISKAKGQPREPQVYTLPPSRDELTKNQVSLTCLVKGFYPSDIAVEWESNGQPENNYKTTPPVLDSDGSFFLTSKLTVDKSRWQQGNVFSCSVMHEALHNHYTQKSLSLSPGK

SEQ ID NO: 1445 - protein, 351 aa, Artificial Sequence
  Synthetic Sequence
DVQLVESGGGLVQPGGSLRLSCAASGRIFSVNAMGWYRQAPGKQRELVAAITNQGAPTYADSVKGRFTISRDNSKNTVYLQMNSLRPEDTAVYYCKAFTRGDDYWGQGTLVTVSSGGSGGSGGSDKTHTCPPCPAPEAAGGPSVFLFPPKPKDTLMISRTPEVTCVVVDVSHEDPEVKFNWYVDGVEVHNAKTKPREEQYNSTYRVVSVLTVLHQDWLNGKEYKCKVSNKALGAPIEKTISKAKGQPREPQVYTLPPSRDELTKNQVSLTCLVKGFYPSDIAVEWESNGQPENNYKTTPPVLDSDGSFFLTSKLTVDKSRWQQGNVFSCSVMHEALHNHYTQKSLSLSPGK

SEQ ID NO: 1446 - protein, 423 aa, Artificial Sequence
  Synthetic Sequence
DKTHTCPPCPAPEAAGGPSVFLFPPKPKDTLMISRTPEVTCVVVDVSHEDPEVKFNWYVDGVEVHNAKTKPREEQYNSTYRVVSVLTVLHQDWLNGKEYKCKVSNKALGAPIEKTISKAKGQPREPQVYTLPPSRDELTKNQVSLYCLVKGFYPSDIAVEWESNGQPENNYKTTPPVLDSDGSFFLYSKLTVDKSRWQQGNVFSCSVMHEALHNHYTQKSLSLSPGKGGSGGSGGSGGSGGSGGSGGSGGSGGSGGSGCDLPQTHSLGSRRTLMLLAQMRKISLFSCLKDRHDFGFPQEEFGNQFQKAETIPVLHEMIQQIFNLFSTKDSSAAWDETLLDKFYTELYQQLNDLEACVIQGVGVTETPLMKEDSILAVRKYFQRITLYLKEKKYSPCAWEVVRAEIMASFSLSTNLQESLRSKE

SEQ ID NO: 1447 - protein, 408 aa, Artificial Sequence
  Synthetic Sequence
DKTHTCPPCPAPEAAGGPSVFLFPPKPKDTLMISRTPEVTCVVVDVSHEDPEVKFNWYVDGVEVHNAKTKPREEQYNSTYRVVSVLTVLHQDWLNGKEYKCKVSNKALGAPIEKTISKAKGQPREPQVYTLPPSRDELTKNQVSLYCLVKGFYPSDIAVEWESNGQPENNYKTTPPVLDSDGSFFLYSKLTVDKSRWQQGNVFSCSVMHEALHNHYTQKSLSLSPGKGGSGGSGGSGGSGGSGCDLPQTHSLGSRRTLMLLAQMRKISLFSCLKDRHDFGFPQEEFGNQFQKAETIPVLHEMIQQIFNLFSTKDSSAAWDETLLDKFYTELYQQLNDLEACVIQGVGVTETPLMKEDSILAVRKYFQRITLYLKEKKYSPCAWEVVRAEIMASFSLSTNLQESLRSKE

SEQ ID NO: 1448 - protein, 402 aa, Artificial Sequence
  Synthetic Sequence
DKTHTCPPCPAPEAAGGPSVFLFPPKPKDTLMISRTPEVTCVVVDVSHEDPEVKFNWYVDGVEVHNAKTKPREEQYNSTYRVVSVLTVLHQDWLNGKEYKCKVSNKALGAPIEKTISKAKGQPREPQVYTLPPSRDELTKNQVSLYCLVKGFYPSDIAVEWESNGQPENNYKTTPPVLDSDGSFFLYSKLTVDKSRWQQGNVFSCSVMHEALHNHYTQKSLSLSPGKGGSGGSGGSGCDLPQTHSLGSRRTLMLLAQMRKISLFSCLKDRHDFGFPQEEFGNQFQKAETIPVLHEMIQQIFNLFSTKDSSAAWDETLLDKFYTELYQQLNDLEACVIQGVGVTETPLMKEDSILAVRKYFQRITLYLKEKKYSPCAWEVVRAEIMASFSLSTNLQESLRSKE

SEQ ID NO: 1449 - protein, 568 aa, Artificial Sequence
  Synthetic Sequence
DVQLVESGGGLVQPGGSLRLSCAASGRIFSVNAMGWYRQAPGKQRELVAAITNQGAPTYADSVKGRFTISRDNSKNTVYLQMNSLRPEDTAVYYCKAFTRGDDYWGQGTLVTVSSGGSGGSGGSGGSGGSGGSGGSGGSGGSGGSDKTHTCPPCPAPEAAGGPSVFLFPPKPKDTLMISRTPEVTCVVVDVSHEDPEVKFNWYVDGVEVHNAKTKPREEQYNSTYRVVSVLTVLHQDWLNGKEYKCKVSNKALGAPIEKTISKAKGQPREPQVYTLPPSRDELTKNQVSLTCLVKGFYPSDIAVEWESNGQPENNYKTTPPVLDSDGSFFLYSKLTVDKSRWQQGNVFSCSVMHEALHNHYTQKSLSLSPGKGGSGGSGGSGGSGGSGGSGGSGGSGGSGGSGCDLPQTHSLGSRRTLMLLAQMRKISLFSCLKDRHDFGFPQEEFGNQFQKAETIPVLHEMIQQIFNLFSTKDSSAAWDETLLDKFYTELYQQLNDLEACVIQGVGVTETPLMKEDSILAVRKYFQRITLYLKEKKYSPCAWEVVRAEIMASFSLSTNLQESLRSKE

SEQ ID NO: 1450 - protein, 538 aa, Artificial Sequence
  Synthetic Sequence
DVQLVESGGGLVQPGGSLRLSCAASGRIFSVNAMGWYRQAPGKQRELVAAITNQGAPTYADSVKGRFTISRDNSKNTVYLQMNSLRPEDTAVYYCKAFTRGDDYWGQGTLVTVSSGGSGGSGGSGGSGGSDKTHTCPPCPAPEAAGGPSVFLFPPKPKDTLMISRTPEVTCVVVDVSHEDPEVKFNWYVDGVEVHNAKTKPREEQYNSTYRVVSVLTVLHQDWLNGKEYKCKVSNKALGAPIEKTISKAKGQPREPQVYTLPPSRDELTKNQVSLTCLVKGFYPSDIAVEWESNGQPENNYKTTPPVLDSDGSFFLYSKLTVDKSRWQQGNVFSCSVMHEALHNHYTQKSLSLSPGKGGSGGSGGSGGSGGSGCDLPQTHSLGSRRTLMLLAQMRKISLFSCLKDRHDFGFPQEEFGNQFQKAETIPVLHEMIQQIFNLFSTKDSSAAWDETLLDKFYTELYQQLNDLEACVIQGVGVTETPLMKEDSILAVRKYFQRITLYLKEKKYSPCAWEVVRAEIMASFSLSTNLQESLRSKE

SEQ ID NO: 1451 - protein, 526 aa, Artificial Sequence
  Synthetic Sequence
DVQLVESGGGLVQPGGSLRLSCAASGRIFSVNAMGWYRQAPGKQRELVAAITNQGAPTYADSVKGRFTISRDNSKNTVYLQMNSLRPEDTAVYYCKAFTRGDDYWGQGTLVTVSSGGSGGSGGSDKTHTCPPCPAPEAAGGPSVFLFPPKPKDTLMISRTPEVTCVVVDVSHEDPEVKFNWYVDGVEVHNAKTKPREEQYNSTYRVVSVLTVLHQDWLNGKEYKCKVSNKALGAPIEKTISKAKGQPREPQVYTLPPSRDELTKNQVSLTCLVKGFYPSDIAVEWESNGQPENNYKTTPPVLDSDGSFFLYSKLTVDKSRWQQGNVFSCSVMHEALHNHYTQKSLSLSPGKGGSGGSGGSGCDLPQTHSLGSRRTLMLLAQMRKISLFSCLKDRHDFGFPQEEFGNQFQKAETIPVLHEMIQQIFNLFSTKDSSAAWDETLLDKFYTELYQQLNDLEACVIQGVGVTETPLMKEDSILAVRKYFQRITLYLKEKKYSPCAWEVVRAEIMASFSLSTNLQESLRSKE

SEQ ID NO: 1452 - protein, 514 aa, Artificial Sequence
  Synthetic Sequence
DVQLVESGGGLVQPGGSLRLSCAASGRIFSVNAMGWYRQAPGKQRELVAAITNQGAPTYADSVKGRFTISRDNSKNTVYLQMNSLRPEDTAVYYCKAFTRGDDYWGQGTLVTVSSAAADKTHTCPPCPAPEAAGGPSVFLFPPKPKDTLMISRTPEVTCVVVDVSHEDPEVKFNWYVDGVEVHNAKTKPREEQYNSTYRVVSVLTVLHQDWLNGKEYKCKVSNKALGAPIEKTISKAKGQPREPQVYTLPPSRDELTKNQVSLTCLVKGFYPSDIAVEWESNGQPENNYKTTPPVLDSDGSFFLYSKLTVDKSRWQQGNVFSCSVMHEALHNHYTQKSLSLSPGKAAAGCDLPQTHSLGSRRTLMLLAQMRKISLFSCLKDRHDFGFPQEEFGNQFQKAETIPVLHEMIQQIFNLFSTKDSSAAWDETLLDKFYTELYQQLNDLEACVIQGVGVTETPLMKEDSILAVRKYFQRITLYLKEKKYSPCAWEVVRAEIMASFSLSTNLQESLRSKE

SEQ ID NO: 1453 - protein, 402 aa, Artificial Sequence
  Synthetic Sequence
QVQLQESGGGLVQPGGSLRLSCAASGRIFSVNAMGWYRQAPGKQRELVAAITNQGAPTYADSVKGRFTISRDNAGNTVYLQMNSLRPEDTAVYYCKAFTRGDDYWGQGTQVTVSSGGSGGSGGSGGSGGSGGSGGSGGSGGSGGSGGSGGSGGSGGSGGSGGSGGSGGSGGSGGSDKTHTCPPCPAPEAAGGPSVFLFPPKPKDTLMISRTPEVTCVVVDVSHEDPEVKFNWYVDGVEVHNAKTKPREEQYNSTYRVVSVLTVLHQDWLNGKEYKCKVSNKALGAPIEKTISKAKGQPREPQVYTLPPSRDELTKNQVSLTCLVKGFYPSDIAVEWESNGQPENNYKTTPPVLDSDGSFFLTSKLTVDKSRWQQGNVFSCSVMHEALHNHYTQKSLSLSPGK

SEQ ID NO: 1454 - protein, 453 aa, Artificial Sequence
  Synthetic Sequence
DKTHTCPPCPAPEAAGGPSVFLFPPKPKDTLMISRTPEVTCVVVDVSHEDPEVKFNWYVDGVEVHNAKTKPREEQYNSTYRVVSVLTVLHQDWLNGKEYKCKVSNKALGAPIEKTISKAKGQPREPQVYTLPPSRDELTKNQVSLYCLVKGFYPSDIAVEWESNGQPENNYKTTPPVLDSDGSFFLYSKLTVDKSRWQQGNVFSCSVMHEALHNHYTQKSLSLSPGKGGSGGSGGSGGSGGSGGSGGSGGSGGSGGSGGSGGSGGSGGSGGSGGSGGSGGSGGSGGSGCDLPQTHSLGSRRTLMLLAQMRKISLFSCLKDRHDFGFPQEEFGNQFQKAETIPVLHEMIQQIFNLFSTKDSSAAWDETLLDKFYTELYQQLNDLEACVIQGVGVTETPLMKEDSILAVRKYFQRITLYLKEKKYSPCAWEVVRAEIMASFSLSTNLQESLRSKE

SEQ ID NO: 1455 - protein, 402 aa, Artificial Sequence
  Synthetic Sequence
QVQLQESGGGLVQPGGSLRLSCAASGRIFSVNAMGWYRQAPGKQRELVAAITNQGAPTYADSVKGRFTISRDNAGNTVYLQMNSLRPEDTAVYYCKAFTRGDDYWGQGTQVTVSSGGSGGSGGSGGSGGSGGSGGSGGSGGSGGSGGSGGSGGSGGSGGSGGSGGSGGSGGSGGSDKTHTCPPCPAPEAAGGPSVFLFPPKPKDTLMISRTPEVTCVVVDVSHEDPEVKFNWYVDGVEVHNAKTKPREEQYNSTYRVVSVLTVLHQDWLNGKEYKCQVSNKALPAPIEKTISKAKGQPREPQVYTLPPSRDELTKNQVSLTCLVKGFYPSDIAVEWESNGQPENNYKTTPPVLDSDGSFFLTSKLTVDKSRWQQGNVFSCSVMHEALHNHYTQKSLSLSPGK

SEQ ID NO: 1456 - protein, 453 aa, Artificial Sequence
  Synthetic Sequence
DKTHTCPPCPAPEAAGGPSVFLFPPKPKDTLMISRTPEVTCVVVDVSHEDPEVKFNWYVDGVEVHNAKTKPREEQYNSTYRVVSVLTVLHQDWLNGKEYQCKVSNKALPAPIEKTISKAKGQPREPQVYTLPPSRDELTKNQVSLYCLVKGFYPSDIAVEWESNGQPENNYKTTPPVLDSDGSFFLYSKLTVDKSRWQQGNVFSCSVMHEALHNHYTQKSLSLSPGKGGSGGSGGSGGSGGSGGSGGSGGSGGSGGSGGSGGSGGSGGSGGSGGSGGSGGSGGSGGSGCDLPQTHSLGSRRTLMLLAQMRKISLFSCLKDRHDFGFPQEEFGNQFQKAETIPVLHEMIQQIFNLFSTKDSSAAWDETLLDKFYTELYQQLNDLEACVIQGVGVTETPLMKEDSILAVRKYFQRITLYLKEKKYSPCAWEVVRAEIMASFSLSTNLQESLRSKE

SEQ ID NO: 1457 - protein, 402 aa, Artificial Sequence
  Synthetic Sequence
QVQLQESGGGLVQPGGSLRLSCAASGRIFSVNAMGWYRQAPGKQRELVAAITNQGAPTYADSVKGRFTISRDNAGNTVYLQMNSLRPEDTAVYYCKAFTRGDDYWGQGTQVTVSSGGSGGSGGSGGSGGSGGSGGSGGSGGSGGSGGSGGSGGSGGSGGSGGSGGSGGSGGSGGSDKTHTCPPCPAPEAAGGPSVFLFPPKPKDTLMISRTPEVTCVVVDVSHEDPEVKFNWYVDGVEVHNAKTKPREEQYNSTYRVVSVLTVLHQDWLNGKEYKCAVSNKALPAPIEKTISKAKGQPREPQVYTLPPSRDELTKNQVSLTCLVKGFYPSDIAVEWESNGQPENNYKTTPPVLDSDGSFFLTSKLTVDKSRWQQGNVFSCSVMHEALHNHYTQKSLSLSPGK

SEQ ID NO: 1458 - protein, 453 aa, Artificial Sequence
  Synthetic Sequence
DKTHTCPPCPAPEAAGGPSVFLFPPKPKDTLMISRTPEVTCVVVDVSHEDPEVKFNWYVDGVEVHNAKTKPREEQYNSTYRVVSVLTVLHQDWLNGKEYKCAVSNKALPAPIEKTISKAKGQPREPQVYTLPPSRDELTKNQVSLYCLVKGFYPSDIAVEWESNGQPENNYKTTPPVLDSDGSFFLYSKLTVDKSRWQQGNVFSCSVMHEALHNHYTQKSLSLSPGKGGSGGSGGSGGSGGSGGSGGSGGSGGSGGSGGSGGSGGSGGSGGSGGSGGSGGSGGSGGSGCDLPQTHSLGSRRTLMLLAQMRKISLFSCLKDRHDFGFPQEEFGNQFQKAETIPVLHEMIQQIFNLFSTKDSSAAWDETLLDKFYTELYQQLNDLEACVIQGVGVTETPLMKEDSILAVRKYFQRITLYLKEKKYSPCAWEVVRAEIMASFSLSTNLQESLRSKE

SEQ ID NO: 1459 - protein, 402 aa, Artificial Sequence
  Synthetic Sequence
QVQLQESGGGLVQPGGSLRLSCAASGRIFSVNAMGWYRQAPGKQRELVAAITNQGAPTYADSVKGRFTISRDNAGNTVYLQMNSLRPEDTAVYYCKAFTRGDDYWGQGTQVTVSSGGSGGSGGSGGSGGSGGSGGSGGSGGSGGSGGSGGSGGSGGSGGSGGSGGSGGSGGSGGSDKTHTCPPCPAPEAAGGPSVFLFPPKPKDTLMISRTPEVTCVVVDVSHEDPEVKFNWYVDGVEVHNAKTKPREEQYNSTYRVVSVLTVLHQDWLNGKEYKCKVSNKALPASIEKTISKAKGQPREPQVYTLPPSRDELTKNQVSLTCLVKGFYPSDIAVEWESNGQPENNYKTTPPVLDSDGSFFLTSKLTVDKSRWQQGNVFSCSVMHEALHNHYTQKSLSLSPGK

SEQ ID NO: 1460 - protein, 453 aa, Artificial Sequence
  Synthetic Sequence
DKTHTCPPCPAPEAAGGPSVFLFPPKPKDTLMISRTPEVTCVVVDVSHEDPEVKFNWYVDGVEVHNAKTKPREEQYNSTYRVVSVLTVLHQDWLNGKEYKCKVSNKALPASIEKTISKAKGQPREPQVYTLPPSRDELTKNQVSLYCLVKGFYPSDIAVEWESNGQPENNYKTTPPVLDSDGSFFLYSKLTVDKSRWQQGNVFSCSVMHEALHNHYTQKSLSLSPGKGGSGGSGGSGGSGGSGGSGGSGGSGGSGGSGGSGGSGGSGGSGGSGGSGGSGGSGGSGGSGCDLPQTHSLGSRRTLMLLAQMRKISLFSCLKDRHDFGFPQEEFGNQFQKAETIPVLHEMIQQIFNLFSTKDSSAAWDETLLDKFYTELYQQLNDLEACVIQGVGVTETPLMKEDSILAVRKYFQRITLYLKEKKYSPCAWEVVRAEIMASFSLSTNLQESLRSKE

SEQ ID NO: 1461 - protein, 357 aa, Artificial Sequence; identical to SEQ ID NO: 1442
  Synthetic Sequence

SEQ ID NO: 1462 - protein, 357 aa, Artificial Sequence; identical to SEQ ID NO: 1444
  Synthetic Sequence

SEQ ID NO: 1463 - protein, 423 aa, Artificial Sequence; identical to SEQ ID NO: 1446
  Synthetic Sequence

SEQ ID NO: 1464 - protein, 423 aa, Artificial Sequence
  Synthetic Sequence
DKTHTCPPCPAPEAAGGPSVFLFPPKPKDTLMISRTPEVTCVVVDVSHEDPEVKFNWYVDGVEVHNAKTKPREEQYNSTYRVVSVLTVLHQDWLNGKEYKCKVSNKALGAPIEKTISKAKGQPREPQVYTLPPSRDELTKNQVSLYCLVKGFYPSDIAVEWESNGQPENNYKTTPPVLDSDGSFFLYSKLTVDKSRWQQGNVFSCSVMHEALHNHYTQKSLSLSPGKGGSGGSGGSGGSGGSGGSGGSGGSGGSGGSGCDLPQTHSLGSRRTLMLLAQMRKISLFSCLKDRHDFGFPQEEFGNQFQKAETIPVLHEMIQQIFNLFSTKDSSAAWDETLLDKFYTELYQQLNDLEACVIQGVGVAETPLMKEDSILAVRKYFQRITLYLKEKKYSPCAWEVVRAEIMASFSLSTNLQESLRSKE

SEQ ID NO: 1465 - protein, 423 aa, Artificial Sequence
  Synthetic Sequence
DKTHTCPPCPAPEAAGGPSVFLFPPKPKDTLMISRTPEVTCVVVDVSHEDPEVKFNWYVDGVEVHNAKTKPREEQYNSTYRVVSVLTVLHQDWLNGKEYKCKVSNKALGAPIEKTISKAKGQPREPQVYTLPPSRDELTKNQVSLYCLVKGFYPSDIAVEWESNGQPENNYKTTPPVLDSDGSFFLYSKLTVDKSRWQQGNVFSCSVMHEALHNHYTQKSLSLSPGKGGSGGSGGSGGSGGSGGSGGSGGSGGSGGSGCDLPQTHSLGSRRTLMLLAQMRKISLFSCLKDRHDFGFPQEEFGNQFQKAETIPVLHEMIQQIFNLFSTKDSSAAWDETLLDKFYTELYQQLNDLEACVIQGVGVEETPLMKEDSILAVRKYFQRITLYLKEKKYSPCAWEVVRAEIMASFSLSTNLQESLRSKE

SEQ ID NO: 1466 - protein, 423 aa, Artificial Sequence
  Synthetic Sequence
DKTHTCPPCPAPEAAGGPSVFLFPPKPKDTLMISRTPEVTCVVVDVSHEDPEVKFNWYVDGVEVHNAKTKPREEQYNSTYRVVSVLTVLHQDWLNGKEYKCKVSNKALGAPIEKTISKAKGQPREPQVYTLPPSRDELTKNQVSLYCLVKGFYPSDIAVEWESNGQPENNYKTTPPVLDSDGSFFLYSKLTVDKSRWQQGNVFSCSVMHEALHNHYTQKSLSLSPGKGGSGGSGGSGGSGGSGGSGGSGGSGGSGGSGCDLPQTHSLGSRRTLMLLAQMRRISLFSCLKDRHDFGFPQEEFGNQFQKAETIPVLHEMIQQIFNLFSTKDSSAAWDETLLDKFYTELYQQLNDLEACVIQGVGVTETPLMKEDSILAVRKYFQRITLYLKEKKYSPCAWEVVRAEIMASFSLSTNLQESLRSKE

SEQ ID NO: 1467 - protein, 423 aa, Artificial Sequence
  Synthetic Sequence
DKTHTCPPCPAPEAAGGPSVFLFPPKPKDTLMISRTPEVTCVVVDVSHEDPEVKFNWYVDGVEVHNAKTKPREEQYNSTYRVVSVLTVLHQDWLNGKEYKCKVSNKALGAPIEKTISKAKGQPREPQVYTLPPSRDELTKNQVSLYCLVKGFYPSDIAVEWESNGQPENNYKTTPPVLDSDGSFFLYSKLTVDKSRWQQGNVFSCSVMHEALHNHYTQKSLSLSPGKGGSGGSGGSGGSGGSGGSGGSGGSGGSGGSGCDLPQTHSLGSRRTLMLLAQMRRISLFSCLKDRHDFGFPQEEFGNQFQKAETIPVLHEMIQQIFNLFSTKDSSAAWDETLLDKFYTELYQQLNDLEACVIQGVGVAETPLMKEDSILAVRKYFQRITLYLKEKKYSPCAWEVVRAEIMASFSLSTNLQESLRSKE

SEQ ID NO: 1468 - protein, 423 aa, Artificial Sequence
  Synthetic Sequence
DKTHTCPPCPAPEAAGGPSVFLFPPKPKDTLMISRTPEVTCVVVDVSHEDPEVKFNWYVDGVEVHNAKTKPREEQYNSTYRVVSVLTVLHQDWLNGKEYKCKVSNKALGAPIEKTISKAKGQPREPQVYTLPPSRDELTKNQVSLYCLVKGFYPSDIAVEWESNGQPENNYKTTPPVLDSDGSFFLYSKLTVDKSRWQQGNVFSCSVMHEALHNHYTQKSLSLSPGKGGSGGSGGSGGSGGSGGSGGSGGSGGSGGSGCDLPQTHSLGSRRTLMLLAQMRRISLFSCLKDRHDFGFPQEEFGNQFQKAETIPVLHEMIQQIFNLFSTKDSSAAWDETLLDKFYTELYQQLNDLEACVIQGVGVEETPLMKEDSILAVRKYFQRITLYLKEKKYSPCAWEVVRAEIMASFSLSTNLQESLRSKE

SEQ ID NO: 1469 - protein, 402 aa, Artificial Sequence; identical to SEQ ID NO: 1453
  Synthetic Sequence

SEQ ID NO: 1470 - protein, 453 aa, Artificial Sequence; identical to SEQ ID NO: 1454
  Synthetic Sequence

SEQ ID NO: 1471 - protein, 402 aa, Artificial Sequence
  Synthetic Sequence
DVQLVESGGGLVQPGGSLRLSCAASGSFSSINVMGWYRQAPGKERELVARITNLGLPNYADSVKGRFTISRDNSKNTVYLQMNSLRPEDTAVYYCYLVALKAEYWGQGTLVTVSSGGSGGSGGSGGSGGSGGSGGSGGSGGSGGSGGSGGSGGSGGSGGSGGSGGSGGSGGSGGSDKTHTCPPCPAPEAAGGPSVFLFPPKPKDTLMISRTPEVTCVVVDVSHEDPEVKFNWYVDGVEVHNAKTKPREEQYNSTYRVVSVLTVLHQDWLNGKEYKCKVSNKALGAPIEKTISKAKGQPREPQVYTLPPSRDELTKNQVSLTCLVKGFYPSDIAVEWESNGQPENNYKTTPPVLDSDGSFFLTSKLTVDKSRWQQGNVFSCSVMHEALHNHYTQKSLSLSPGK

SEQ ID NO: 1472 - protein, 452 aa, Artificial Sequence
  Synthetic Sequence
CDLPQTHSLGSRRTLMLLAQMRKISLFSCLKDRHDFGFPQEEFGNQFQKAETIPVLHEMIQQIFNLFSTKDSSAAWDETLLDKFYTELYQQLNDLEACVIQGVGVTETPLMKEDSILAVRKYFQRITLYLKEKKYSPCAWEVVRAEIMASFSLSTNLQESLRSKEGGSGGSGGSGGSGGSGGSGGSGGSGGSGGSGGSGGSGGSGGSGGSGGSGGSGGSGGSGGSDKTHTCPPCPAPEAAGGPSVFLFPPKPKDTLMISRTPEVTCVVVDVSHEDPEVKFNWYVDGVEVHNAKTKPREEQYNSTYRVVSVLTVLHQDWLNGKEYKCKVSNKALGAPIEKTISKAKGQPREPQVYTLPPSRDELTKNQVSLYCLVKGFYPSDIAVEWESNGQPENNYKTTPPVLDSDGSFFLYSKLTVDKSRWQQGNVFSCSVMHEALHNHYTQKSLSLSPGK

SEQ ID NO: 1473 - protein, 402 aa, Artificial Sequence
  Synthetic Sequence
DKTHTCPPCPAPEAAGGPSVFLFPPKPKDTLMISRTPEVTCVVVDVSHEDPEVKFNWYVDGVEVHNAKTKPREEQYNSTYRVVSVLTVLHQDWLNGKEYKCKVSNKALGAPIEKTISKAKGQPREPQVYTLPPSRDELTKNQVSLTCLVKGFYPSDIAVEWESNGQPENNYKTTPPVLDSDGSFFLTSKLTVDKSRWQQGNVFSCSVMHEALHNHYTQKSLSLSPGKGGSGGSGGSGGSGGSGGSGGSGGSGGSGGSGGSGGSGGSGGSGGSGGSGGSGGSGGSGGSDVQLVESGGGLVQPGGSLRLSCAASGSFSSINVMGWYRQAPGKERELVARITNLGLPNYADSVKGRFTISRDNSKNTVYLQMNSLRPEDTAVYYCYLVALKAEYWGQGTLVTVSS

SEQ ID NO: 1474 - protein, 402 aa, Artificial Sequence
  Synthetic Sequence
DKTHTCPPCPAPEAAGGPSVFLFPPKPKDTLMISRTPEVTCVVVDVSHEDPEVKFNWYVDGVEVHNAKTKPREEQYNSTYRVVSVLTVLHQDWLNGKEYKCKVSNKALGAPIEKTISKAKGQPREPQVYTLPPSRDELTKNQVSLTCLVKGFYPSDIAVEWESNGQPENNYKTTPPVLDSDGSFFLTSKLTVDKSRWQQGNVFSCSVMHEALHNHYTQKSLSLSPGKGGSGGSGGSGGSGGSGGSGGSGGSGGSGGSGGSGGSGGSGGSGGSGGSGGSGGSGGSGGSDVQLVESGGGLVQPGGSLRLSCAASGRIFSVNAMGWYRQAPGKQRELVAAITNQGAPTYADSVKGRFTISRDNSKNTVYLQMNSLRPEDTAVYYCKAFTRGDDYWGQGTLVTVSS

SEQ ID NO: 1475 - protein, 402 aa, Artificial Sequence; identical to SEQ ID NO: 1453
  Synthetic Sequence

SEQ ID NO: 1476 - protein, 453 aa, Artificial Sequence; identical to SEQ ID NO: 1454
  Synthetic Sequence

SEQ ID NO: 1477 - protein, 357 aa, Artificial Sequence; identical to SEQ ID NO: 1442
  Synthetic Sequence

SEQ ID NO: 1478 - protein, 400 aa, Artificial Sequence
  Synthetic Sequence
QLQESGGGLVQPGGSLRLSCAASGRIFSVNAMGWYRQAPGKQRELVAAITNQGAPTYADSVKGRFTISRDNAGNTVYLQMNSLRPEDTAVYYCKAFTRGDDYWGQGTQVTVSSGGSGGSGGSGGSGGSGGSGGSGGSGGSGGSGGSGGSGGSGGSGGSGGSGGSGGSGGSGGSDKTHTCPPCPAPEAAGGPSVFLFPPKPKDTLMISRTPEVTCVVVDVSHEDPEVKFNWYVDGVEVHNAKTKPREEQYNSTYRVVSVLTVLHQDWLNGKEYKCQVSNKALPAPIEKTISKAKGQPREPQVCTLPPSRDELTKNQVSLSCAVKGFYPSDIAVEWESNGQPENNYKTTPPVLDSDGSFFLVSKLTVDKSRWQQGNVFSCSVMHEALHNHYTQKSLSLSPGK

SEQ ID NO: 1479 - protein, 452 aa, Artificial Sequence
  Synthetic Sequence
DKTHTCPPCPAPEAAGGPSVFLFPPKPKDTLMISRTPEVTCVVVDVSHEDPEVKFNWYVDGVEVHNAKTKPREEQYNSTYRVVSVLTVLHQDWLNGKEYKCQVSNKALPAPIEKTISKAKGQPREPQVYTLPPCRDELTKNQVSLWCLVKGFYPSDIAVEWESNGQPENNYKTTPPVLDSDGSFFLYSKLTVDKSRWQQGNVFSCSVMHEALHNHYTQKSLSLSPGKGGSGGSGGSGGSGGSGGSGGSGGSGGSGGSGGSGGSGGSGGSGGSGGSGGSGGSGGSGGSCDLPQTHSLGSRRTLMLLAQMRKISLFSCLKDRHDFGFPQEEFGNQFQKAETIPVLHEMIQQIFNLFSTKDSSAAWDETLLDKFYTELYQQLNDLEACVIQGVGVEETPLMKEDSILAVRKYFQRITLYLKEKKYSPCAWEVVRAEIMASFSLSTNLQESLRSKE

SEQ ID NO: 1480 - protein, 402 aa, Artificial Sequence
  Synthetic Sequence
QVQLVESGGGLVHPGGSLRLSCAASGSFSSINVMGWYRQAPGKERELVARITNLGLPNYADSVTGRFTISRDNAKNTVYLQMNSLKPEDTAVYYCYLVALKAEYWGQGTQVTVSSGGSGGSGGSGGSGGSGGSGGSGGSGGSGGSGGSGGSGGSGGSGGSGGSGGSGGSGGSGGSDKTHTCPPCPAPEAAGGPSVFLFPPKPKDTLMISRTPEVTCVVVDVSHEDPEVKFNWYVDGVEVHNAKTKPREEQYNSTYRVVSVLTVLHQDWLNGKEYKCQVSNKALPAPIEKTISKAKGQPREPQVCTLPPSRDELTKNQVSLSCAVKGFYPSDIAVEWESNGQPENNYKTTPPVLDSDGSFFLVSKLTVDKSRWQQGNVFSCSVMHEALHNHYTQKSLSLSPGK

SEQ ID NO: 1481 - protein, 402 aa, Artificial Sequence; identical to SEQ ID NO: 1480
  Synthetic Sequence

SEQ ID NO: 1482 - protein, 452 aa, Artificial Sequence; identical to SEQ ID NO: 1479
  Synthetic Sequence

SEQ ID NO: 1483 - protein, 627 aa, Artificial Sequence
  Synthetic Sequence
QVQLVESGGGLVHPGGSLRLSCAASGSFSSINVMGWYRQAPGKERELVARITNLGLPNYADSVTGRFTISRDNAKNTVYLQMNSLKPEDTAVYYCYLVALKAEYWGQGTQVTVSSGGSGGSGGSGGSGGSGGSGGSGGSGGSGGSGGSGGSGGSGGSGGSGGSGGSGGSGGSGGSDKTHTCPPCPAPEAAGGPSVFLFPPKPKDTLMISRTPEVTCVVVDVSHEDPEVKFNWYVDGVEVHNAKTKPREEQYNSTYRVVSVLTVLHQDWLNGKEYKCQVSNKALPAPIEKTISKAKGQPREPQVYTLPPCRDELTKNQVSLWCLVKGFYPSDIAVEWESNGQPENNYKTTPPVLDSDGSFFLYSKLTVDKSRWQQGNVFSCSVMHEALHNHYTQKSLSLSPGKGGSGGSGGSGGSGGSGGSGGSGGSGGSGGSGGSGGSGGSGGSGGSGGSGGSGGSGGSGGSCDLPQTHSLGSRRTLMLLAQMRKISLFSCLKDRHDFGFPQEEFGNQFQKAETIPVLHEMIQQIFNLFSTKDSSAAWDETLLDKFYTELYQQLNDLEACVIQGVGVEETPLMKEDSILAVRKYFQRITLYLKEKKYSPCAWEVVRAEIMASFSLSTNLQESLRSKE

SEQ ID NO: 1484 - protein, 577 aa, Artificial Sequence
  Synthetic Sequence
QVQLVESGGGLVHPGGSLRLSCAASGSFSSINVMGWYRQAPGKERELVARITNLGLPNYADSVTGRFTISRDNAKNTVYLQMNSLKPEDTAVYYCYLVALKAEYWGQGTQVTVSSGGSGGSGGSGGSGGSGGSGGSGGSGGSGGSGGSGGSGGSGGSGGSGGSGGSGGSGGSGGSQVQLVESGGGLVHPGGSLRLSCAASGSFSSINVMGWYRQAPGKERELVARITNLGLPNYADSVTGRFTISRDNAKNTVYLQMNSLKPEDTAVYYCYLVALKAEYWGQGTQVTVSSGGSGGSGGSGGSGGSGGSGGSGGSGGSGGSGGSGGSGGSGGSGGSGGSGGSGGSGGSGGSDKTHTCPPCPAPEAAGGPSVFLFPPKPKDTLMISRTPEVTCVVVDVSHEDPEVKFNWYVDGVEVHNAKTKPREEQYNSTYRVVSVLTVLHQDWLNGKEYKCQVSNKALPAPIEKTISKAKGQPREPQVCTLPPSRDELTKNQVSLSCAVKGFYPSDIAVEWESNGQPENNYKTTPPVLDSDGSFFLVSKLTVDKSRWQQGNVFSCSVMHEALHNHYTQKSLSLSPGK

SEQ ID NO: 1485 - protein, 452 aa, Artificial Sequence; identical to SEQ ID NO: 1479
  Synthetic Sequence

SEQ ID NO: 1486 - protein, 357 aa, Artificial Sequence
  Synthetic Sequence
DVQLVESGGGLVQPGGSLRLSCAASGSFSSINVMGWYRQAPGKERELVARITNLGLPNYADSVKGRFTISRDNSKNTVYLQMNSLRPEDTAVYYCYLVALKAEYWGQGTLVTVSSGGSGGSGGSGGSGGSDKTHTCPPCPAPEAAGGPSVFLFPPKPKDTLMISRTPEVTCVVVDVSHEDPEVKFNWYVDGVEVHNAKTKPREEQYNSTYRVVSVLTVLHQDWLNGKEYKCQVSNKALPAPIEKTISKAKGQPREPQVYTLPPSRDELTKNQVSLTCLVKGFYPSDIAVEWESNGQPENNYKTTPPVLDSDGSFFLTSKLTVDKSRWQQGNVFSCSVMHEALHNHYTQKSLSLSPGK

SEQ ID NO: 1487 - protein, 423 aa, Artificial Sequence
  Synthetic Sequence
DKTHTCPPCPAPEAAGGPSVFLFPPKPKDTLMISRTPEVTCVVVDVSHEDPEVKFNWYVDGVEVHNAKTKPREEQYNSTYRVVSVLTVLHQDWLNGKEYKCQVSNKALPAPIEKTISKAKGQPREPQVYTLPPSRDELTKNQVSLYCLVKGFYPSDIAVEWESNGQPENNYKTTPPVLDSDGSFFLYSKLTVDKSRWQQGNVFSCSVMHEALHNHYTQKSLSLSPGKGGSGGSGGSGGSGGSGGSGGSGGSGGSGGSGCDLPQTHSLGSRRTLMLLAQMRRISLFSCLKDRHDFGFPQEEFGNQFQKAETIPVLHEMIQQIFNLFSTKDSSAAWDETLLDKFYTELYQQLNDLEACVIQGVGVTETPLMKEDSILAVRKYFQRITLYLKEKKYSPCAWEVVRAEIMASFSLSTNLQESLRSKE

SEQ ID NO: 1488 - protein, 423 aa, Artificial Sequence
  Synthetic Sequence
DKTHTCPPCPAPEAAGGPSVFLFPPKPKDTLMISRTPEVTCVVVDVSHEDPEVKFNWYVDGVEVHNAKTKPREEQYNSTYRVVSVLTVLHQDWLNGKEYKCQVSNKALPAPIEKTISKAKGQPREPQVYTLPPSRDELTKNQVSLYCLVKGFYPSDIAVEWESNGQPENNYKTTPPVLDSDGSFFLYSKLTVDKSRWQQGNVFSCSVMHEALHNHYTQKSLSLSPGKGGSGGSGGSGGSGGSGGSGGSGGSGGSGGSGCDLPQTHSLGSRRTLMLLAQMRRISLFSCLKDRHDFGFPQEEFGNQFQKAETIPVLHEMIQQIFNLFSTKDSSAAWDETLLDKFYTELYQQLNDLEACVIQGVGVEETPLMKEDSILAVRKYFQRITLYLKEKKYSPCAWEVVRAEIMASFSLSTNLQESLRSKE

SEQ ID NO: 1489 - protein, 357 aa, Artificial Sequence
  Synthetic Sequence
DVQLVESGGGLVQPGGSLRLSCAASGSFSSINVMGWYRQAPGKERELVARITNLGLPNYADSVKGRFTISRDNSKNTVYLQMNSLRPEDTAVYYCYLVALKAEYWGQGTLVTVSSGGSGGSGGSGGSGGSDKTHTCPPCPAPEAAGGPSVFLFPPKPKDTLMISRTPEVTCVVVDVSHEDPEVKFNWYVDGVEVHNAKTKPREEQYNSTYRVVSVLTVLHQDWLNGKEYKCQVSNKALPAPIEKTISKAKGQPREPQVCTLPPSRDELTKNQVSLSCAVKGFYPSDIAVEWESNGQPENNYKTTPPVLDSDGSFFLVSKLTVDKSRWQQGNVFSCSVMHEALHNHYTQKSLSLSPGK

SEQ ID NO: 1490 - protein, 423 aa, Artificial Sequence
  Synthetic Sequence
DKTHTCPPCPAPEAAGGPSVFLFPPKPKDTLMISRTPEVTCVVVDVSHEDPEVKFNWYVDGVEVHNAKTKPREEQYNSTYRVVSVLTVLHQDWLNGKEYKCQVSNKALPAPIEKTISKAKGQPREPQVYTLPPCRDELTKNQVSLWCLVKGFYPSDIAVEWESNGQPENNYKTTPPVLDSDGSFFLYSKLTVDKSRWQQGNVFSCSVMHEALHNHYTQKSLSLSPGKGGSGGSGGSGGSGGSGGSGGSGGSGGSGGSGCDLPQTHSLGSRRTLMLLAQMRRISLFSCLKDRHDFGFPQEEFGNQFQKAETIPVLHEMIQQIFNLFSTKDSSAAWDETLLDKFYTELYQQLNDLEACVIQGVGVTETPLMKEDSILAVRKYFQRITLYLKEKKYSPCAWEVVRAEIMASFSLSTNLQESLRSKE

SEQ ID NO: 1491 - protein, 423 aa, Artificial Sequence
  Synthetic Sequence
DKTHTCPPCPAPEAAGGPSVFLFPPKPKDTLMISRTPEVTCVVVDVSHEDPEVKFNWYVDGVEVHNAKTKPREEQYNSTYRVVSVLTVLHQDWLNGKEYKCQVSNKALPAPIEKTISKAKGQPREPQVYTLPPCRDELTKNQVSLWCLVKGFYPSDIAVEWESNGQPENNYKTTPPVLDSDGSFFLYSKLTVDKSRWQQGNVFSCSVMHEALHNHYTQKSLSLSPGKGGSGGSGGSGGSGGSGGSGGSGGSGGSGGSGCDLPQTHSLGSRRTLMLLAQMRRISLFSCLKDRHDFGFPQEEFGNQFQKAETIPVLHEMIQQIFNLFSTKDSSAAWDETLLDKFYTELYQQLNDLEACVIQGVGVEETPLMKEDSILAVRKYFQRITLYLKEKKYSPCAWEVVRAEIMASFSLSTNLQESLRSKE

SEQ ID NO: 1492 - protein, 647 aa, Artificial Sequence
  Synthetic Sequence
QVQLQESGGGLVQAGGSLRLSCTASGTIFSINRMDWFRQAPGKQRELVALITSDGTPAYADSAKGRFTISRDNTKKTVSLQMNSLKPEDTAVYYCHVSSGVYNYWGQGTQVTVSSAAAYPYDVPDYGSGGSGGSGGSGGSGGSGGSGGSGGSGGSGGSGGSGGSGGSGGSGGSGGSGGSGGSGGSGGSDKTHTCPPCPAPEAAGGPSVFLFPPKPKDTLMISRTPEVTCVVVDVSHEDPEVKFNWYVDGVEVHNAKTKPREEQYNSTYRVVSVLTVLHQDWLNGKEYKCKVSNKALGAPIEKTISKAKGQPREPQVYTLPPSRDELTKNQVSLTCLVKGFYPSDIAVEWESNGQPENNYKTTPPVLDSDGSFFLYSKLTVDKSRWQQGNVFSCSVMHEALHNHYTQKSLSLSPGKGGSGGSGGSGGSGGSGGSGGSGGSGGSGGSGGSGGSGGSGGSGGSGGSGGSGGSGGSGGSGCDLPQTHSLGSRRTLMLLAQMRKISLFSCLKDRHDFGFPQEEFGNQFQKAETIPVLHEMIQQIFNLFSTKDSSAAWDETLLDKFYTELYQQLNDLEACVIQGVGVTETPLMKEDSILAVRKYFQRITLYLKEKKYSPCAWEVVRAEIMASFSLSTNLQESLRSKEHHHHHH

SEQ ID NO: 1493 - protein, 402 aa, Artificial Sequence
  Synthetic Sequence
QVQLQESGGGLVQAGGSLRLSCTASGTIFSINRMDWFRQAPGKQRELVALITSDGTPAYADSAKGRFTISRDNTKKTVSLQMNSLKPEDTAVYYCHVSSGVYNYWGQGTQVTVSSGGSGGSGGSGGSGGSGGSGGSGGSGGSGGSGGSGGSGGSGGSGGSGGSGGSGGSGGSGGSDKTHTCPPCPAPEAAGGPSVFLFPPKPKDTLMISRTPEVTCVVVDVSHEDPEVKFNWYVDGVEVHNAKTKPREEQYNSTYRVVSVLTVLHQDWLNGKEYKCKVSNKALGAPIEKTISKAKGQPREPQVYTLPPSRDELTKNQVSLTCLVKGFYPSDIAVEWESNGQPENNYKTTPPVLDSDGSFFLTSKLTVDKSRWQQGNVFSCSVMHEALHNHYTQKSLSLSPGK

SEQ ID NO: 1494 - protein, 453 aa, Artificial Sequence; identical to SEQ ID NO: 1454
  Synthetic Sequence

SEQ ID NO: 1495 - protein, 402 aa, Artificial Sequence
  Synthetic Sequence
QVQLQESGGGLVQAGGSLRLSCTASGTIFSINRMDWFRQAPGKQRELVALITSDGTPAYADSAKGRFTISRDNTKKTVSLQMNSLKPEDTAVYYCHVSSGVYNYWGQGTQVTVSSGGSGGSGGSGGSGGSGGSGGSGGSGGSGGSGGSGGSGGSGGSGGSGGSGGSGGSGGSGGSDKTHTCPPCPAPEAAGGPSVFLFPPKPKDTLMISRTPEVTCVVVDVSHEDPEVKFNWYVDGVEVHNAKTKPREEQYNSTYRVVSVLTVLHQDWLNGKEYKCQVSNKALPAPIEKTISKAKGQPREPQVCTLPPSRDELTKNQVSLSCAVKGFYPSDIAVEWESNGQPENNYKTTPPVLDSDGSFFLVSKLTVDKSRWQQGNVFSCSVMHEALHNHYTQKSLSLSPGK

SEQ ID NO: 1496 - protein, 627 aa, Artificial Sequence
  Synthetic Sequence
QVQLQESGGGLVQAGGSLRLSCTASGTIFSINRMDWFRQAPGKQRELVALITSDGTPAYADSAKGRFTISRDNTKKTVSLQMNSLKPEDTAVYYCHVSSGVYNYWGQGTQVTVSSGGSGGSGGSGGSGGSGGSGGSGGSGGSGGSGGSGGSGGSGGSGGSGGSGGSGGSGGSGGSDKTHTCPPCPAPEAAGGPSVFLFPPKPKDTLMISRTPEVTCVVVDVSHEDPEVKFNWYVDGVEVHNAKTKPREEQYNSTYRVVSVLTVLHQDWLNGKEYKCQVSNKALPAPIEKTISKAKGQPREPQVYTLPPCRDELTKNQVSLWCLVKGFYPSDIAVEWESNGQPENNYKTTPPVLDSDGSFFLYSKLTVDKSRWQQGNVFSCSVMHEALHNHYTQKSLSLSPGKGGSGGSGGSGGSGGSGGSGGSGGSGGSGGSGGSGGSGGSGGSGGSGGSGGSGGSGGSGGSCDLPQTHSLGSRRTLMLLAQMRKISLFSCLKDRHDFGFPQEEFGNQFQKAETIPVLHEMIQQIFNLFSTKDSSAAWDETLLDKFYTELYQQLNDLEACVIQGVGVEETPLMKEDSILAVRKYFQRITLYLKEKKYSPCAWEVVRAEIMASFSLSTNLQESLRSKE

SEQ ID NO: 1497 - protein, 414 aa, Artificial Sequence
  Synthetic Sequence
QVQLQESGGGSVQAGDSLRLSCAASGRTFSGYAMGWFRQAPGKEREFVATISTSGSSTYYADSVKGRFTISRDNAKKSVYLQINSLKTEDAAVYYCAARLSFDNTAFYTSAIRYSYWGQGTQVTVSSGGSGGSGGSGGSGGSGGSGGSGGSGGSGGSGGSGGSGGSGGSGGSGGSGGSGGSGGSGGSDKTHTCPPCPAPEAAGGPSVFLFPPKPKDTLMISRTPEVTCVVVDVSHEDPEVKFNWYVDGVEVHNAKTKPREEQYNSTYRVVSVLTVLHQDWLNGKEYKCQVSNKALPAPIEKTISKAKGQPREPQVCTLPPSRDELTKNQVSLSCAVKGFYPSDIAVEWESNGQPENNYKTTPPVLDSDGSFFLVSKLTVDKSRWQQGNVFSCSVMHEALHNHYTQKSLSLSPGK

SEQ ID NO: 1498 - protein, 452 aa, Artificial Sequence; identical to SEQ ID NO: 1479
  Synthetic Sequence

SEQ ID NO: 1499 - protein, 405 aa, Artificial Sequence
  Synthetic Sequence
QVQLQESGGGLAQAGGSLRLSCAASGRTFSMGWFRQAPGKEREFVAAITYSGGSPYYASSVRGRFTISRDNAKNTVYLQMNSLKPEDTAVYYCAANPTYGSDWNAENWGQGTQVTVSSGGSGGSGGSGGSGGSGGSGGSGGSGGSGGSGGSGGSGGSGGSGGSGGSGGSGGSGGSGGSDKTHTCPPCPAPEAAGGPSVFLFPPKPKDTLMISRTPEVTCVVVDVSHEDPEVKFNWYVDGVEVHNAKTKPREEQYNSTYRVVSVLTVLHQDWLNGKEYKCQVSNKALPAPIEKTISKAKGQPREPQVCTLPPSRDELTKNQVSLSCAVKGFYPSDIAVEWESNGQPENNYKTTPPVLDSDGSFFLVSKLTVDKSRWQQGNVFSCSVMHEALHNHYTQKSLSLSPGK

SEQ ID NO: 1500 - protein, 452 aa, Artificial Sequence; identical to SEQ ID NO: 1479
  Synthetic Sequence

SEQ ID NO: 1501 - protein, 452 aa, Artificial Sequence; identical to SEQ ID NO: 1479
  Synthetic Sequence

SEQ ID NO: 1502 - protein, 407 aa, Artificial Sequence
  Synthetic Sequence
QVQLQESGGGLVQPGGSLRLSCAASGSTFSINAVAWYRQAPGKRRELVAGISGGGVTNYPDSVKGRFTISRDNAKNTVYLQMSSLKPEDTAVYYCNLWPPRASPGGRVYWGQGTQVTVSSGGSGGSGGSGGSGGSGGSGGSGGSGGSGGSGGSGGSGGSGGSGGSGGSGGSGGSGGSGGSDKTHTCPPCPAPEAAGGPSVFLFPPKPKDTLMISRTPEVTCVVVDVSHEDPEVKFNWYVDGVEVHNAKTKPREEQYNSTYRVVSVLTVLHQDWLNGKEYKCQVSNKALPAPIEKTISKAKGQPREPQVCTLPPSRDELTKNQVSLSCAVKGFYPSDIAVEWESNGQPENNYKTTPPVLDSDGSFFLVSKLTVDKSRWQQGNVFSCSVMHEALHNHYTQKSLSLSPGK

SEQ ID NO: 1503 - protein, 407 aa, Artificial Sequence
  Synthetic Sequence
QVQLQESGGGLVQPGGSLRLSCAASGSTFSGNAMAWYRQAPGKRRELVAGISGGGVTNYPDSVKGRFTISRDNAKNTVYLQMSSLKPEDTAVYYCNLWPPRVSPGGGVYWGQGTQVTVSSGGSGGSGGSGGSGGSGGSGGSGGSGGSGGSGGSGGSGGSGGSGGSGGSGGSGGSGGSGGSDKTHTCPPCPAPEAAGGPSVFLFPPKPKDTLMISRTPEVTCVVVDVSHEDPEVKFNWYVDGVEVHNAKTKPREEQYNSTYRVVSVLTVLHQDWLNGKEYKCQVSNKALPAPIEKTISKAKGQPREPQVCTLPPSRDELTKNQVSLSCAVKGFYPSDIAVEWESNGQPENNYKTTPPVLDSDGSFFLVSKLTVDKSRWQQGNVFSCSVMHEALHNHYTQKSLSLSPGK

SEQ ID NO: 1504 - protein, 407 aa, Artificial Sequence
  Synthetic Sequence
QVQLQESGGGLVQPGESLRLSCAVSGSTSSMNAMAWYRQAPGKRRELVAGISGGGATNYPDSVKGRFTISRDNAKNTVYLQMSSLKPEDTAVYYCNLWPPRASPGGGVYWGQGTQVTVSSGGSGGSGGSGGSGGSGGSGGSGGSGGSGGSGGSGGSGGSGGSGGSGGSGGSGGSGGSGGSDKTHTCPPCPAPEAAGGPSVFLFPPKPKDTLMISRTPEVTCVVVDVSHEDPEVKFNWYVDGVEVHNAKTKPREEQYNSTYRVVSVLTVLHQDWLNGKEYKCQVSNKALPAPIEKTISKAKGQPREPQVCTLPPSRDELTKNQVSLSCAVKGFYPSDIAVEWESNGQPENNYKTTPPVLDSDGSFFLVSKLTVDKSRWQQGNVFSCSVMHEALHNHYTQKSLSLSPGK

SEQ ID NO: 1505 - protein, 452 aa, Artificial Sequence; identical to SEQ ID NO: 1479
  Synthetic Sequence

SEQ ID NO: 1506 - protein, 411 aa, Artificial Sequence
  Synthetic Sequence
QVQLQESGGGLVHPGGSLRLSCAASGRSFSSYFMGWFRQAPGKEREFVAGIGWNDGSINYADSVKGRFTISRDNAKNTGYLQMNSLKPEDTAVYYCAASVSLYGLEKSSAYTSWGQGTQVTVSSGGSGGSGGSGGSGGSGGSGGSGGSGGSGGSGGSGGSGGSGGSGGSGGSGGSGGSGGSGGSDKTHTCPPCPAPEAAGGPSVFLFPPKPKDTLMISRTPEVTCVVVDVSHEDPEVKFNWYVDGVEVHNAKTKPREEQYNSTYRVVSVLTVLHQDWLNGKEYKCQVSNKALPAPIEKTISKAKGQPREPQVCTLPPSRDELTKNQVSLSCAVKGFYPSDIAVEWESNGQPENNYKTTPPVLDSDGSFFLVSKLTVDKSRWQQGNVFSCSVMHEALHNHYTQKSLSLSPGK

SEQ ID NO: 1507 - protein, 452 aa, Artificial Sequence; identical to SEQ ID NO: 1479
  Synthetic Sequence

SEQ ID NO: 1508 - protein, 452 aa, Artificial Sequence; identical to SEQ ID NO: 1479
  Synthetic Sequence

SEQ ID NO: 1509 - protein, 577 aa, Artificial Sequence
  Synthetic Sequence
QVQLVESGGGLVHPGGSLRLSCAASGSFSSINVMGWYRQAPGKERELVARITNLGLPNYADSVTGRFTISRDNAKNTVYLQMNSLKPEDTAVYYCYLVALKAEYWGQGTQVTVSSGGSGGSGGSGGSGGSGGSGGSGGSGGSGGSGGSGGSGGSGGSGGSGGSGGSGGSGGSGGSQVQLQESGGGLVQAGGSLRLSCTASGTIFSINRMDWFRQAPGKQRELVALITSDGTPAYADSAKGRFTISRDNTKKTVSLQMNSLKPEDTAVYYCHVSSGVYNYWGQGTQVTVSSGGSGGSGGSGGSGGSGGSGGSGGSGGSGGSGGSGGSGGSGGSGGSGGSGGSGGSGGSGGSDKTHTCPPCPAPEAAGGPSVFLFPPKPKDTLMISRTPEVTCVVVDVSHEDPEVKFNWYVDGVEVHNAKTKPREEQYNSTYRVVSVLTVLHQDWLNGKEYKCQVSNKALPAPIEKTISKAKGQPREPQVCTLPPSRDELTKNQVSLSCAVKGFYPSDIAVEWESNGQPENNYKTTPPVLDSDGSFFLVSKLTVDKSRWQQGNVFSCSVMHEALHNHYTQKSLSLSPGK

SEQ ID NO: 1510 - protein, 577 aa, Artificial Sequence
  Synthetic Sequence
QVQLQESGGGLVQAGGSLRLSCTASGTIFSINRMDWFRQAPGKQRELVALITSDGTPAYADSAKGRFTISRDNTKKTVSLQMNSLKPEDTAVYYCHVSSGVYNYWGQGTQVTVSSGGSGGSGGSGGSGGSGGSGGSGGSGGSGGSGGSGGSGGSGGSGGSGGSGGSGGSGGSGGSQVQLVESGGGLVHPGGSLRLSCAASGSFSSINVMGWYRQAPGKERELVARITNLGLPNYADSVTGRFTISRDNAKNTVYLQMNSLKPEDTAVYYCYLVALKAEYWGQGTQVTVSSGGSGGSGGSGGSGGSGGSGGSGGSGGSGGSGGSGGSGGSGGSGGSGGSGGSGGSGGSGGSDKTHTCPPCPAPEAAGGPSVFLFPPKPKDTLMISRTPEVTCVVVDVSHEDPEVKFNWYVDGVEVHNAKTKPREEQYNSTYRVVSVLTVLHQDWLNGKEYKCQVSNKALPAPIEKTISKAKGQPREPQVYTLPPCRDELTKNQVSLWCLVKGFYPSDIAVEWESNGQPENNYKTTPPVLDSDGSFFLYSKLTVDKSRWQQGNVFSCSVMHEALHNHYTQKSLSLSPGK

SEQ ID NO: 1511 - protein, 402 aa, Artificial Sequence; identical to SEQ ID NO: 1480
  Synthetic Sequence

SEQ ID NO: 1512 - protein, 402 aa, Artificial Sequence; identical to SEQ ID NO: 1495
  Synthetic Sequence

SEQ ID NO: 1513 - protein, 452 aa, Artificial Sequence; identical to SEQ ID NO: 1479
  Synthetic Sequence

SEQ ID NO: 1514 - protein, 627 aa, Artificial Sequence; identical to SEQ ID NO: 1496
  Synthetic Sequence

SEQ ID NO: 1515 - protein, 577 aa, Artificial Sequence
  Synthetic Sequence
QVQLQESGGGLVQPGGSLRLSCAASGRIFSVNAMGWYRQAPGKQRELVAAITNQGAPTYADSVKGRFTISRDNAGNTVYLQMNSLRPEDTAVYYCKAFTRGDDYWGQGTQVTVSSGGSGGSGGSGGSGGSGGSGGSGGSGGSGGSGGSGGSGGSGGSGGSGGSGGSGGSGGSGGSDKTHTCPPCPAPEAAGGPSVFLFPPKPKDTLMISRTPEVTCVVVDVSHEDPEVKFNWYVDGVEVHNAKTKPREEQYNSTYRVVSVLTVLHQDWLNGKEYKCQVSNKALPAPIEKTISKAKGQPREPQVCTLPPSRDELTKNQVSLSCAVKGFYPSDIAVEWESNGQPENNYKTTPPVLDSDGSFFLVSKLTVDKSRWQQGNVFSCSVMHEALHNHYTQKSLSLSPGKGGSGGSGGSGGSGGSGGSGGSGGSGGSGGSGGSGGSGGSGGSGGSGGSGGSGGSGGSGGSQVQLQESGGGLVQAGGSLRLSCTASGTIFSINRMDWFRQAPGKQRELVALITSDGTPAYADSAKGRFTISRDNTKKTVSLQMNSLKPEDTAVYYCHVSSGVYNYWGQGTQVTVSS

SEQ ID NO: 1516 - protein, 577 aa, Artificial Sequence; identical to SEQ ID NO: 1509
  Synthetic Sequence

SEQ ID NO: 1517 - protein, 802 aa, Artificial Sequence
  Synthetic Sequence
QVQLVESGGGLVHPGGSLRLSCAASGSFSSINVMGWYRQAPGKERELVARITNLGLPNYADSVTGRFTISRDNAKNTVYLQMNSLKPEDTAVYYCYLVALKAEYWGQGTQVTVSSGGSGGSGGSGGSGGSGGSGGSGGSGGSGGSGGSGGSGGSGGSGGSGGSGGSGGSGGSGGSQVQLQESGGGLVQAGGSLRLSCTASGTIFSINRMDWFRQAPGKQRELVALITSDGTPAYADSAKGRFTISRDNTKKTVSLQMNSLKPEDTAVYYCHVSSGVYNYWGQGTQVTVSSGGSGGSGGSGGSGGSGGSGGSGGSGGSGGSGGSGGSGGSGGSGGSGGSGGSGGSGGSGGSDKTHTCPPCPAPEAAGGPSVFLFPPKPKDTLMISRTPEVTCVVVDVSHEDPEVKFNWYVDGVEVHNAKTKPREEQYNSTYRVVSVLTVLHQDWLNGKEYKCQVSNKALPAPIEKTISKAKGQPREPQVYTLPPCRDELTKNQVSLWCLVKGFYPSDIAVEWESNGQPENNYKTTPPVLDSDGSFFLYSKLTVDKSRWQQGNVFSCSVMHEALHNHYTQKSLSLSPGKGGSGGSGGSGGSGGSGGSGGSGGSGGSGGSGGSGGSGGSGGSGGSGGSGGSGGSGGSGGSCDLPQTHSLGSRRTLMLLAQMRKISLFSCLKDRHDFGFPQEEFGNQFQKAETIPVLHEMIQQIFNLFSTKDSSAAWDETLLDKFYTELYQQLNDLEACVIQGVGVEETPLMKEDSILAVRKYFQRITLYLKEKKYSPCAWEVVRAEIMASFSLSTNLQESLRSKE

SEQ ID NO: 1518 - protein, 414 aa, Artificial Sequence; identical to SEQ ID NO: 1497
  Synthetic Sequence

SEQ ID NO: 1519 - protein, 411 aa, Artificial Sequence; identical to SEQ ID NO: 1506
  Synthetic Sequence

SEQ ID NO: 1520 - protein, 452 aa, Artificial Sequence; identical to SEQ ID NO: 1479
  Synthetic Sequence

SEQ ID NO: 1521 - protein, 632 aa, Artificial Sequence
  Synthetic Sequence
QVQLQESGGGLVQPGGSLRLSCAASGSIFSINVMGWYRQTPGKERELVAKITNFGITSYADSAQGRFTISRGNAKNTVYLQMNSLKPEDTAVYYCNLDTTGWGPPPYQYWGQGTQVTVSSGGSGGSGGSGGSGGSGGSGGSGGSGGSGGSGGSGGSGGSGGSGGSGGSGGSGGSGGSGGSDKTHTCPPCPAPEAAGGPSVFLFPPKPKDTLMISRTPEVTCVVVDVSHEDPEVKFNWYVDGVEVHNAKTKPREEQYNSTYRVVSVLTVLHQDWLNGKEYKCQVSNKALPAPIEKTISKAKGQPREPQVYTLPPCRDELTKNQVSLWCLVKGFYPSDIAVEWESNGQPENNYKTTPPVLDSDGSFFLYSKLTVDKSRWQQGNVFSCSVMHEALHNHYTQKSLSLSPGKGGSGGSGGSGGSGGSGGSGGSGGSGGSGGSGGSGGSGGSGGSGGSGGSGGSGGSGGSGGSCDLPQTHSLGSRRTLMLLAQMRKISLFSCLKDRHDFGFPQEEFGNQFQKAETIPVLHEMIQQIFNLFSTKDSSAAWDETLLDKFYTELYQQLNDLEACVIQGVGVEETPLMKEDSILAVRKYFQRITLYLKEKKYSPCAWEVVRAEIMASFSLSTNLQESLRSKE

SEQ ID NO: 1522 - protein, 541 aa, Artificial Sequence
  Synthetic Sequence
DVVMTQTPLSLPVTLGNQASIFCRSSLGLVHRNGNTYLHWYLQKPGQSPKLLIYKVSHRFSGVPDRFSGSGSGTDFTLKISRVEAEDLGVYFCSQSTHVPWTFGGGTKLEIKGGGGSGGGGSGGGGSGGGGSQAYLQQSGAELVRPGASVKMSCKASGYTFTSHNLHWVKQTPRQGLQWIGAIYPGNGNTAYNQKFKGKATLTVDKSSSTAYMQLSSLTSDDSAVYFCARWGSVVGDWYFDVWGTGTTVTVSSSGGSGGSGGSGGSGGSGGSGGSGGSGGSGGSGGSGGSGGSGGSGGSGGSGGSGGSGGSGGSDKTHTCPPCPAPEAAGGPSVFLFPPKPKDTLMISRTPEVTCVVVDVSHEDPEVKFNWYVDGVEVHNAKTKPREEQYNSTYRVVSVLTVLHQDWLNGKEYKCQVSNKALPAPIEKTISKAKGQPREPQVCTLPPSRDELTKNQVSLSCAVKGFYPSDIAVEWESNGQPENNYKTTPPVLDSDGSFFLVSKLTVDKSRWQQGNVFSCSVMHEALHNHYTQKSLSLSPGK

SEQ ID NO: 1523 - protein, 452 aa, Artificial Sequence; identical to SEQ ID NO: 1479
  Synthetic Sequence

SEQ ID NO: 1524 - protein, 533 aa, Artificial Sequence
  Synthetic Sequence
QIVLSQSPAILSASPGEKVTMTCRASSSVSYIHWFQQKPGSSPKPWIYATSNLASGVPVRFSGSGSGTSYSLTISRVEAEDAATYYCQQWTSNPPTFGGGTKLEIKRGSTGGGGSGGGGSGGGGSQVQLQQPGAELVKPGASVKMSCKASGYTFTSYNMHWVKQTPGRGLEWIGAIYPGNGDTSYNQKFKGKATLTADKSSSTAYMQLSSLTSEDSAVYYCARSTYYGGDWYFNVWGAGTTVTVSSGGSGGSGGSGGSGGSGGSGGSGGSGGSGGSGGSGGSGGSGGSGGSGGSGGSGGSGGSGGSDKTHTCPPCPAPEAAGGPSVFLFPPKPKDTLMISRTPEVTCVVVDVSHEDPEVKFNWYVDGVEVHNAKTKPREEQYNSTYRVVSVLTVLHQDWLNGKEYKCQVSNKALPAPIEKTISKAKGQPREPQVCTLPPSRDELTKNQVSLSCAVKGFYPSDIAVEWESNGQPENNYKTTPPVLDSDGSFFLVSKLTVDKSRWQQGNVFSCSVMHEALHNHYTQKSLSLSPGK

SEQ ID NO: 1525 - protein, 452 aa, Artificial Sequence; identical to SEQ ID NO: 1479
  Synthetic Sequence

SEQ ID NO: 1526 - protein, 533 aa, Artificial Sequence; identical to SEQ ID NO: 1524
  Synthetic Sequence

SEQ ID NO: 1527 - protein, 759 aa, Artificial Sequence
  Synthetic Sequence
DKTHTCPPCPAPEAAGGPSVFLFPPKPKDTLMISRTPEVTCVVVDVSHEDPEVKFNWYVDGVEVHNAKTKPREEQYNSTYRVVSVLTVLHQDWLNGKEYKCQVSNKALPAPIEKTISKAKGQPREPQVYTLPPCRDELTKNQVSLWCLVKGFYPSDIAVEWESNGQPENNYKTTPPVLDSDGSFFLYSKLTVDKSRWQQGNVFSCSVMHEALHNHYTQKSLSLSPGKGGSGGSGGSGGSGGSGGSGGSGGSGGSGGSGGSGGSGGSGGSGGSGGSGGSGGSGGSGGSSSRTPSDKPVAHVVANPQAEGQLQWLNRRANALLANGVELRDNQLVVPSEGLYLIYSQVLFKGQGCPSTHVLLTHTISRIAVSFQTKVNLLSAIKSPCQRETPEGAEAKPWYEPIYLGGVFQLEKGDRLSAEINRPDYLDFAESGQVYFGIIALGGGGSSSRTPSDKPVAHVVANPQAEGQLQWLNRRANALLANGVELRDNQLVVPSEGLYLIYSQVLFKGQGCPSTHVLLTHTISRIAVSFQTKVNLLSAIKSPCQRETPEGAEAKPWYEPIYLGGVFQLEKGDRLSAEINRPDYLDFAESGQVYFGIIALGGGGSSSRTPSDKPVAHVVANPQAEGQLQWLNRRANALLANGVELRDNQLVVPSEGLYLIYSQVLFKGQGCPSTHVLLTHTISRIAVSFQTKVNLLSAIKSPCQRETPEGAEAKPWYEPIYLGGVFQLEKGDRLSAEINRPDYLDFAESGQVYFGIIAL

SEQ ID NO: 1528 - protein, 446 aa, Artificial Sequence
  Synthetic Sequence
TQDCSFQHSPISSDFAVKIRELSDYLLQDYPVTVASNLQDEELCGGLWRLVLAQRWMERLKTVAGSKMQGLLERVNTEIHFVTKCAFQPPPSCLRFVQTNISRLLQETSEQLVALKPWITRQNFSRCLELQCQPDSSTLPPPWSPRPLEATAPTAPQPSGGSGGSGGSGGSGGSGGSGGSGGSGGSGGSGGSGGSGGSGGSGGSGGSGGSGGSGGSGGSDKTHTCPPCPAPEAAGGPSVFLFPPKPKDTLMISRTPEVTCVVVDVSHEDPEVKFNWYVDGVEVHNAKTKPREEQYNSTYRVVSVLTVLHQDWLNGKEYKCQVSNKALPAPIEKTISKAKGQPREPQVCTLPPSRDELTKNQVSLSCAVKGFYPSDIAVEWESNGQPENNYKTTPPVLDSDGSFFLVSKLTVDKSRWQQGNVFSCSVMHEALHNHYTQKSLSLSPGK

SEQ ID NO: 1529 - protein, 452 aa, Artificial Sequence; identical to SEQ ID NO: 1479
  Synthetic Sequence

SEQ ID NO: 1530 - protein, 438 aa, Artificial Sequence
  Synthetic Sequence
PGWFLDSPDRPWNPPTFSPALLVVTEGDNATFTCSFSNTSESFVLNWYRMSPSNQTDKLAAFPEDRSQPGQDCRFRVTQLPNGRDFHMSVVRARRNDSGTYLCGAISLAPKAQIKESLRAELRVTERRAEVPTAHPSPSPRPAGQFQTLVSGGSGGSGGSGGSGGSGGSGGSGGSGGSGGSGGSGGSGGSGGSGGSGGSGGSGGSGGSGGSDKTHTCPPCPAPEAAGGPSVFLFPPKPKDTLMISRTPEVTCVVVDVSHEDPEVKFNWYVDGVEVHNAKTKPREEQYNSTYRVVSVLTVLHQDWLNGKEYKCQVSNKALPAPIEKTISKAKGQPREPQVCTLPPSRDELTKNQVSLSCAVKGFYPSDIAVEWESNGQPENNYKTTPPVLDSDGSFFLVSKLTVDKSRWQQGNVFSCSVMHEALHNHYTQKSLSLSPGK

SEQ ID NO: 1531 - protein, 452 aa, Artificial Sequence; identical to SEQ ID NO: 1479
  Synthetic Sequence

SEQ ID NO: 1532 - protein, 508 aa, Artificial Sequence
  Synthetic Sequence
FTVTVPKDLYVVEYGSNMTIECKFPVEKQLDLAALIVYWEMEDKNIIQFVHGEEDLKVQHSSYRQRARLLKDQLSLGNAALQITDVKLQDAGVYRCMISYGGADYKRITVKVNAPYNKINQRILVVDPVTSEHELTCQAEGYPKAEVIWTSSDHQVLSGKTTTTNSKREEKLFNVTSTLRINTTTNEIFYCTFRRLDPEENHTAELVIPELPLAHPPNERSGGSGGSGGSGGSGGSGGSGGSGGSGGSGGSGGSGGSGGSGGSGGSGGSGGSGGSGGSGGSDKTHTCPPCPAPEAAGGPSVFLFPPKPKDTLMISRTPEVTCVVVDVSHEDPEVKFNWYVDGVEVHNAKTKPREEQYNSTYRVVSVLTVLHQDWLNGKEYKCQVSNKALPAPIEKTISKAKGQPREPQVCTLPPSRDELTKNQVSLSCAVKGFYPSDIAVEWESNGQPENNYKTTPPVLDSDGSFFLVSKLTVDKSRWQQGNVFSCSVMHEALHNHYTQKSLSLSPGK

SEQ ID NO: 1533 - protein, 452 aa, Artificial Sequence; identical to SEQ ID NO: 1479
  Synthetic Sequence

SEQ ID NO: 1534 - protein, 438 aa, Artificial Sequence; identical to SEQ ID NO: 1530
  Synthetic Sequence

SEQ ID NO: 1535 - protein, 663 aa, Artificial Sequence
  Synthetic Sequence
PGWFLDSPDRPWNPPTFSPALLVVTEGDNATFTCSFSNTSESFVLNWYRMSPSNQTDKLAAFPEDRSQPGQDCRFRVTQLPNGRDFHMSVVRARRNDSGTYLCGAISLAPKAQIKESLRAELRVTERRAEVPTAHPSPSPRPAGQFQTLVSGGSGGSGGSGGSGGSGGSGGSGGSGGSGGSGGSGGSGGSGGSGGSGGSGGSGGSGGSGGSDKTHTCPPCPAPEAAGGPSVFLFPPKPKDTLMISRTPEVTCVVVDVSHEDPEVKFNWYVDGVEVHNAKTKPREEQYNSTYRVVSVLTVLHQDWLNGKEYKCQVSNKALPAPIEKTISKAKGQPREPQVYTLPPCRDELTKNQVSLWCLVKGFYPSDIAVEWESNGQPENNYKTTPPVLDSDGSFFLYSKLTVDKSRWQQGNVFSCSVMHEALHNHYTQKSLSLSPGKGGSGGSGGSGGSGGSGGSGGSGGSGGSGGSGGSGGSGGSGGSGGSGGSGGSGGSGGSGGSCDLPQTHSLGSRRTLMLLAQMRKISLFSCLKDRHDFGFPQEEFGNQFQKAETIPVLHEMIQQIFNLFSTKDSSAAWDETLLDKFYTELYQQLNDLEACVIQGVGVEETPLMKEDSILAVRKYFQRITLYLKEKKYSPCAWEVVRAEIMASFSLSTNLQESLRSKE

SEQ ID NO: 1536 - protein, 508 aa, Artificial Sequence; identical to SEQ ID NO: 1532
  Synthetic Sequence

SEQ ID NO: 1537 - protein, 733 aa, Artificial Sequence
  Synthetic Sequence
FTVTVPKDLYVVEYGSNMTIECKFPVEKQLDLAALIVYWEMEDKNIIQFVHGEEDLKVQHSSYRQRARLLKDQLSLGNAALQITDVKLQDAGVYRCMISYGGADYKRITVKVNAPYNKINQRILVVDPVTSEHELTCQAEGYPKAEVIWTSSDHQVLSGKTTTTNSKREEKLFNVTSTLRINTTTNEIFYCTFRRLDPEENHTAELVIPELPLAHPPNERSGGSGGSGGSGGSGGSGGSGGSGGSGGSGGSGGSGGSGGSGGSGGSGGSGGSGGSGGSGGSDKTHTCPPCPAPEAAGGPSVFLFPPKPKDTLMISRTPEVTCVVVDVSHEDPEVKFNWYVDGVEVHNAKTKPREEQYNSTYRVVSVLTVLHQDWLNGKEYKCQVSNKALPAPIEKTISKAKGQPREPQVYTLPPCRDELTKNQVSLWCLVKGFYPSDIAVEWESNGQPENNYKTTPPVLDSDGSFFLYSKLTVDKSRWQQGNVFSCSVMHEALHNHYTQKSLSLSPGKGGSGGSGGSGGSGGSGGSGGSGGSGGSGGSGGSGGSGGSGGSGGSGGSGGSGGSGGSGGSCDLPQTHSLGSRRTLMLLAQMRKISLFSCLKDRHDFGFPQEEFGNQFQKAETIPVLHEMIQQIFNLFSTKDSSAAWDETLLDKFYTELYQQLNDLEACVIQGVGVEETPLMKEDSILAVRKYFQRITLYLKEKKYSPCAWEVVRAEIMASFSLSTNLQESLRSKE

SEQ ID NO: 1538 - protein, 402 aa, Artificial Sequence; identical to SEQ ID NO: 1473
  Synthetic Sequence

SEQ ID NO: 1539 - protein, 452 aa, Artificial Sequence; identical to SEQ ID NO: 1472
  Synthetic Sequence

SEQ ID NO: 1540 - protein, 234 aa, Artificial Sequence
  Synthetic Sequence
DKTHTCPPCPAPEAAGGPSVFLFPPKPKDTLMISRTPEVTCVVVDVSHEDPEVKFNWYVDGVEVHNAKTKPREEQYNSTYRVVSVLTVLHQDWLNGKEYKCKVSNKALGAPIEKTISKAKGQPREPQVYTLPPSRDELTKNQVSLTCLVKGFYPSDIAVEWESNGQPENNYKTTPPVLDSDGSFFLTSKLTVDKSRWQQGNVFSCSVMHEALHNHYTQKSLSLSPGKSGCNGRC

SEQ ID NO: 1541 - protein, 459 aa, Artificial Sequence
  Synthetic Sequence
CDLPQTHSLGSRRTLMLLAQMRKISLFSCLKDRHDFGFPQEEFGNQFQKAETIPVLHEMIQQIFNLFSTKDSSAAWDETLLDKFYTELYQQLNDLEACVIQGVGVTETPLMKEDSILAVRKYFQRITLYLKEKKYSPCAWEVVRAEIMASFSLSTNLQESLRSKEGGSGGSGGSGGSGGSGGSGGSGGSGGSGGSGGSGGSGGSGGSGGSGGSGGSGGSGGSGGSDKTHTCPPCPAPEAAGGPSVFLFPPKPKDTLMISRTPEVTCVVVDVSHEDPEVKFNWYVDGVEVHNAKTKPREEQYNSTYRVVSVLTVLHQDWLNGKEYKCKVSNKALGAPIEKTISKAKGQPREPQVYTLPPSRDELTKNQVSLYCLVKGFYPSDIAVEWESNGQPENNYKTTPPVLDSDGSFFLYSKLTVDKSRWQQGNVFSCSVMHEALHNHYTQKSLSLSPGKSGCNGRC

SEQ ID NO: 1542 - protein, 405 aa, Artificial Sequence; identical to SEQ ID NO: 1499
  Synthetic Sequence

SEQ ID NO: 1543 - protein, 411 aa, Artificial Sequence; identical to SEQ ID NO: 1506
  Synthetic Sequence

SEQ ID NO: 1544 - protein, 414 aa, Artificial Sequence; identical to SEQ ID NO: 1497
  Synthetic Sequence

SEQ ID NO: 1545 - protein, 452 aa, Artificial Sequence; identical to SEQ ID NO: 1479
  Synthetic Sequence

SEQ ID NO: 1546 - protein, 452 aa, Artificial Sequence
  Synthetic Sequence
DKTHTCPPCPAPEAAGGPSVFLFPPKPKDTLMISRTPEVTCVVVDVSHEDPEVKFNWYVDGVEVHNAKTKPREEQYNSTYRVVSVLTVLHQDWLNGKEYKCQVSNKALPAPIEKTISKAKGQPREPQVYTLPPCRDELTKNQVSLWCLVKGFYPSDIAVEWESNGQPENNYKTTPPVLDSDGSFFLYSKLTVDKSRWQQGNVFSCSVMHEALHNHYTQKSLSLSPGKGGSGGSGGSGGSGGSGGSGGSGGSGGSGGSGGSGGSGGSGGSGGSGGSGGSGGSGGSGGSCDLPQTHSLGSRRTLMLLAQMRKISLFSCLKDRHDFGFPQEEFGNQFQKAETIPVLHEMIQQIFNLFSTKDSSAAWDETLLDKFYTELYQQLNDLEACVIQGVGVEETPLMKEDSILAVRKYFQRITLYLKEKKYSPCAWEVVRAEIMRSFSLSTNLQESLRSKE

SEQ ID NO: 1547 - protein, 402 aa, Artificial Sequence; identical to SEQ ID NO: 1480
  Synthetic Sequence

SEQ ID NO: 1548 - protein, 453 aa, Artificial Sequence
  Synthetic Sequence
DKTHTCPPCPAPEAAGGPSVFLFPPKPKDTLMISRTPEVTCVVVDVSHEDPEVKFNWYVDGVEVHNAKTKPREEQYNSTYRVVSVLTVLHQDWLNGKEYKCQVSNKALPAPIEKTISKAKGQPREPQVYTLPPCRDELTKNQVSLWCLVKGFYPSDIAVEWESNGQPENNYKTTPPVLDSDGSFFLYSKLTVDKSRWQQGNVFSCSVMHEALHNHYTQKSLSLSPGKGGSGGSGGSGGSGGSGGSGGSGGSGGSGGSGGSGGSGGSGGSGGSGGSGGSGGSGGSGGSCDLPETHSLDNRRTLMLLAQMSRISPSSCLMDRHDFGFPQEEFDGNQFQKAPAISVLHELIQQIFNLFTTKDSSAAWDEDLLDKFCTELYQQLNDLEACVMQEERVGETPLMNADSILAVKKYFRRITLYLTEKKYSPCAWEVVRAEIMRSLSLSTNLQERLRRKE

SEQ ID NO: 1549 - protein, 402 aa, Artificial Sequence; identical to SEQ ID NO: 1480
  Synthetic Sequence

SEQ ID NO: 1550 - protein, 453 aa, Artificial Sequence
  Synthetic Sequence
DKTHTCPPCPAPEAAGGPSVFLFPPKPKDTLMISRTPEVTCVVVDVSHEDPEVKFNWYVDGVEVHNAKTKPREEQYNSTYRVVSVLTVLHQDWLNGKEYKCQVSNKALPAPIEKTISKAKGQPREPQVYTLPPCRDELTKNQVSLWCLVKGFYPSDIAVEWESNGQPENNYKTTPPVLDSDGSFFLYSKLTVDKSRWQQGNVFSCSVMHEALHNHYTQKSLSLSPGKGGSGGSGGSGGSGGSGGSGGSGGSGGSGGSGGSGGSGGSGGSGGSGGSGGSGGSGGSGGSMSYNLLGFLQRSSNFQCQKLLGQLNGRLEYCLKDRMNFDIPEEIKQLQQFQKEDAALTIYEMLQNIFAIFRQDSSSTGWNETIVENLLANVYHQINHLKTVLEEKLEKEDFTRGKLMSSLHLKRYYGRILHYLKAKEYSHCAWTIVRVEILRNFYFINRLTGYLRN

SEQ ID NO: 1551 - protein, 411 aa, Artificial Sequence; identical to SEQ ID NO: 1506
  Synthetic Sequence

SEQ ID NO: 1552 - protein, 440 aa, Artificial Sequence
  Synthetic Sequence
DKTHTCPPCPAPEAAGGPSVFLFPPKPKDTLMISRTPEVTCVVVDVSHEDPEVKFNWYVDGVEVHNAKTKPREEQYNSTYRVVSVLTVLHQDWLNGKEYKCQVSNKALPAPIEKTISKAKGQPREPQVYTLPPCRDELTKNQVSLWCLVKGFYPSDIAVEWESNGQPENNYKTTPPVLDSDGSFFLYSKLTVDKSRWQQGNVFSCSVMHEALHNHYTQKSLSLSPGKGGSGGSGGSGGSGGSGGSGGSGGSGGSGGSGGSGGSGGSGGSGGSGGSGGSGGSGGSGGSAPVRSLNCTLRDSQQKSLVMSGPYELKALHLGGQDMEQQVVFSMSFVQGEESNDKIPVALGLKEKNLYLSCVLKDDKPTLQLESVDPKNYPKKKMEKRFVFNKIEINNKLEFESAQFPNWYISTSQAENMPVFLGGTKGGQDITDFTMQFVSS

SEQ ID NO: 1553 - protein, 405 aa, Artificial Sequence; identical to SEQ ID NO: 1499
  Synthetic Sequence

SEQ ID NO: 1554 - protein, 759 aa, Artificial Sequence; identical to SEQ ID NO: 1527
  Synthetic Sequence

SEQ ID NO: 1555 - protein, 440 aa, Artificial Sequence
  Synthetic Sequence
DKTHTCPPCPAPEAAGGPSVFLFPPKPKDTLMISRTPEVTCVVVDVSHEDPEVKFNWYVDGVEVHNAKTKPREEQYNSTYRVVSVLTVLHQDWLNGKEYKCQVSNKALPAPIEKTISKAKGQPREPQVCTLPPSRDELTKNQVSLSCAVKGFYPSDIAVEWESNGQPENNYKTTPPVLDSDGSFFLVSKLTVDKSRWQQGNVFSCSVMHEALHNHYTQKSLSLSPGKGGSGGSGGSGGSGGSGGSGGSGGSGGSGGSGGSGGSGGSGGSGGSGGSGGSGGSGGSGGSAPVRSLNCTLRDSQQKSLVMSGPYELKALHLGGQDMEQQVVFSMSFVQGEESNDKIPVALGLKEKNLYLSCVLKDDKPTLQLESVDPKNYPKKKMEKRFVFNKIEINNKLEFESAQFPNWYISTSQAENMPVFLGGTKGGQDITDFTMQFVSS

SEQ ID NO: 1556 - protein, 632 aa, Artificial Sequence; identical to SEQ ID NO: 1521
  Synthetic Sequence

SEQ ID NO: 1557 - protein, 402 aa, Artificial Sequence; identical to SEQ ID NO: 1480
  Synthetic Sequence

SEQ ID NO: 1558 - protein, 452 aa, Artificial Sequence; identical to SEQ ID NO: 1479
  Synthetic Sequence

SEQ ID NO: 1559 - protein, 403 aa, Artificial Sequence
  Synthetic Sequence
SQVQLVESGGGLVHPGGSLRLSCAASGSFSSINVMGWYRQAPGKERELVARITNLGLPNYADSVTGRFTISRDNAKNTVYLQMNSLKPEDTAVYYCYLVALKAEYWGQGTQVTVSSGGSGGSGGSGGSGGSGGSGGSGGSGGSGGSGGSGGSGGSGGSGGSGGSGGSGGSGGSGGSDKTHTCPPCPAPEFLGGPSVFLFPPKPKDTLMISRTPEVTCVVVDVSQEDPEVQFNWYVDGVEVHNAKTKPREEQFNSTYRVVSVLTVLHQDWLNGKEYKCKVSNKGLPSSIEKTISKAKGQPREPQVYTLPPSQEEMTKNQVSLSCAVKGFYPSDIAVEWESNGQPENNYKTTPPVLDSDGSFFLVSRLTVDKSRWQEGNVFSCSVMHEALHNHYTQKSLSLSLGK

SEQ ID NO: 1560 - protein, 452 aa, Artificial Sequence
  Synthetic Sequence
DKTHTCPPCPAPEFLGGPSVFLFPPKPKDTLMISRTPEVTCVVVDVSQEDPEVQFNWYVDGVEVHNAKTKPREEQFNSTYRVVSVLTVLHQDWLNGKEYKCKVSNKGLPSSIEKTISKAKGQPREPQVYTLPPSQEEMTKNQVSLWCLVKGFYPSDIAVEWESNGQPENNYKTTPPVLDSDGSFFLYSRLTVDKSRWQEGNVFSCSVMHEALHNHYTQKSLSLSLGKGGSGGSGGSGGSGGSGGSGGSGGSGGSGGSGGSGGSGGSGGSGGSGGSGGSGGSGGSGGSCDLPQTHSLGSRRTLMLLAQMRKISLFSCLKDRHDFGFPQEEFGNQFQKAETIPVLHEMIQQIFNLFSTKDSSAAWDETLLDKFYTELYQQLNDLEACVIQGVGVEETPLMKEDSILAVRKYFQRITLYLKEKKYSPCAWEVVRAEIMASFSLSTNLQESLRSKE

SEQ ID NO: 1561 - protein, 353 aa, Artificial Sequence
  Synthetic Sequence
QVQLQESGGGLVQPGGSLRLSCAASGRIFSVNAMGWYRQAPGKQRELVAAITNQGAPTYADSVKGRFTISRDNAGNTVYLQMNSLRPEDTAVYYCKAFTRGDDYWGQGTQVTVSSVDGGSGGSGGSGGSGGSGGSRSGGSGGSGGSGGSGGSGGSGGSGGSGGSGGSGGSGGSGGSAAAMCDLPQTHSLGSRRTLMLLAQMRRISLFSCLKDRHDFGFPQEEFGNQFQKAETIPVLHEMIQQIFNLFSTKDSSAAWDETLLDKFYTELYQQLNDLEACVIQGVGVTETPLMKEDSILAVRKYFQRITLYLKEKKYSPCAWEVVRAEIMASFSLSTNLQESLRSKELEHHHHHH

SEQ ID NO: 1562 - protein, 166 aa, Artificial Sequence
  Synthetic Sequence (wild-type IFNalpha1)
CDLPETHSLDNRRTLMLLAQMSRISPSSCLMDRHDFGFPQEEFDGNQFQKAPAISVLHELIQQIFNLFTTKDSSAAWDEDLLDKFCTELYQQLNDLEACVMQEERVGETPLMNADSILAVKKYFRRITLYLTEKKYSPCAWEVVRAEIMRSLSLSTNLQERLRRKE

SEQ ID NO: 1563 - protein, 166 aa, Artificial Sequence
  Synthetic Sequence (IFN-gamma)
MKYTSYILAFQLCIVLGSLGCYCQDPYVKEAENLKKYFNAGHSDVADNGTLFLGILKNWKEESDRKIMQSQIVSFYFKLFKNFKDDQSIQKSVETIKEDMNVKFFNSNKKKRDDFEKLTNYSVTDLNVQRKAIHELIQVMAELSPAAKTGKRKRSQMLFRGRRASQ

SEQ ID NO: 1564 - protein, 114 aa, Artificial Sequence
  Synthetic Sequence (wild type IL-15)
NWVNVISDLKKIEDLIQSMHIDATLYTESDVHPSCKVTAMKCFLLELQVISLESGDASIHDTVENLIILANNSLSSNGNVTESGCKECEELEEKNIKEFLQSFVHIVQMFINTS

SEQ ID NO: 1565 - protein, 227 aa, Artificial Sequence
  Synthetic Sequence (hIgG1 Fc_L234A_L235A_P329G_Y407T)
DKTHTCPPCPAPEAAGGPSVFLFPPKPKDTLMISRTPEVTCVVVDVSHEDPEVKFNWYVDGVEVHNAKTKPREEQYNSTYRVVSVLTVLHQDWLNGKEYKCKVSNKALPAPIEKTISKAKGQPREPQVYTLPPSRDELTKNQVSLTCLVKGFYPSDIAVEWESNGQPENNYKTTPPVLDSDGSFFLTSKLTVDKSRWQQGNVFSCSVMHEALHNHYTQKSLSLSPGK

SEQ ID NO: 1566 - protein, 227 aa, Artificial Sequence
  Synthetic Sequence (hIgG1 Fc_L234A_L235A_P329G_T366Y)
DKTHTCPPCPAPEAAGGPSVFLFPPKPKDTLMISRTPEVTCVVVDVSHEDPEVKFNWYVDGVEVHNAKTKPREEQYNSTYRVVSVLTVLHQDWLNGKEYKCKVSNKALPAPIEKTISKAKGQPREPQVYTLPPSRDELTKNQVSLYCLVKGFYPSDIAVEWESNGQPENNYKTTPPVLDSDGSFFLYSKLTVDKSRWQQGNVFSCSVMHEALHNHYTQKSLSLSPGK

SEQ ID NO: 1567 - protein, 227 aa, Artificial Sequence
  Synthetic Sequence (hIgG1 Fc_L234A_L235A_K322Q_Y349C_T366S_L368A_Y407V)
DKTHTCPPCPAPEAAGGPSVFLFPPKPKDTLMISRTPEVTCVVVDVSHEDPEVKFNWYVDGVEVHNAKTKPREEQYNSTYRVVSVLTVLHQDWLNGKEYKCKVSNKALPAPIEKTISKAKGQPREPQVCTLPPSRDELTKNQVSLSCAVKGFYPSDIAVEWESNGQPENNYKTTPPVLDSDGSFFLVSKLTVDKSRWQQGNVFSCSVMHEALHNHYTQKSLSLSPGK

SEQ ID NO: 1568 - protein, 227 aa, Artificial Sequence
  Synthetic Sequence (hIgG1 Fc_L234A_L235A_K322Q_S354C_T366W)
DKTHTCPPCPAPEAAGGPSVFLFPPKPKDTLMISRTPEVTCVVVDVSHEDPEVKFNWYVDGVEVHNAKTKPREEQYNSTYRVVSVLTVLHQDWLNGKEYKCKVSNKALPAPIEKTISKAKGQPREPQVYTLPPCRDELTKNQVSLWCLVKGFYPSDIAVEWESNGQPENNYKTTPPVLDSDGSFFLYSKLTVDKSRWQQGNVFSCSVMHEALHNHYTQKSLSLSPGK

SEQ ID NO: 1569 - protein, 115 aa, Artificial Sequence
  Synthetic Sequence (R1CHCL50_opt4)
DVQLVESGGGLVQPGGSLRLSCAASGSFSSINVMGWYRQAPGKERELVARITNLGLPNYADSVKGRFTISRDNSKNTVYLQMNSLRPEDTAVYYCYLVALKAEYWGQGTLVTVSS

SEQ ID NO: 1570 - protein, 115 aa, Artificial Sequence
  Synthetic Sequence (3LEC89_opt4)
DVQLVESGGGLVQPGGSLRLSCAASGRIFSVNAMGWYRQAPGKQRELVAAITNQGAPTYADSVKGRFTISRDNSKNTVYLQMNSLRPEDTAVYYCKAFTRGDDYWGQGTLVTVSS
